(19) United States
(12) Patent Application Publication
(10) Pub. No.: US 2010/0233205 A1
(43) Pub. Date: Sep. 16, 2010

(54) ADJUVANTED ANTIGENIC MENINGOCOCCAL COMPOSITIONS

(75) Inventors: Mariagrazia PIZZA, Siena (IT); Marzia Monica Guiliani, Siena (IT)

Correspondence Address: NOVARTIS VACCINES AND DIAGNOSTICS INC., INTELLECTUAL PROPERTY- X100B, P.O. BOX 8097, Emeryville, CA, 94662-8097, US

(73) Assignee: NOVARTIS VACCINES AND DIAGNOSTICS SRL, Siena (IT)

(21) Appl. No.: 12/787,366

(22) Filed: May 25, 2010

Related U.S. Application Data
(62) Division of application No. 10/497,709, filed on Jun. 3, 2005.

(30) Foreign Application Priority Data
Dec. 4, 2001 (GB) 0129007.1

(51) Int. Cl. A61K 39/095; A61K 39/116; A61K 39/295; A61P 31/04; A61P 31/12

(52) U.S. Cl. 424/201.1; 424/236.1; 424/203.1

(57) ABSTRACT

Compositions comprising a Neisserial antigen and a detoxified ADP-ribosylating toxin are provided. These compositions have been found useful for mucosal immunization, particularly for nasal immunization against Neisseria meningitidis.

### CROSS-REFERENCE TO RELATED APPLICATIONS

[0001] This application is a divisional application of U.S. Ser. No. 10/497,709, which is the National Stage of International Application No. PCT/IB02/05662, filed Dec. 4, 2002, which claims the benefit of GB Application Ser. No. GB0129007.1, filed Dec. 4, 2001, each of which is hereby incorporated by reference in its entirety.

[0002] All documents cited herein are incorporated by reference in their entirety.

### INCORPORATION BY REFERENCE OF SEQUENCE LISTING ON ASCII TEXT FILE

[0003] The content of the following submission on ASCII text file is incorporated herein by reference in its entirety: a computer readable form (CRF) of the Sequence Listing (file name: 223002112610SeqListing.txt, date recorded: May 25, 2010, size: 10,527 KB).

### TECHNICAL FIELD

[0004] This invention is in the field of vaccines, and in particular of vaccines against bacteria from the Neisseria genus (e.g., N. gonorrhoeae or, preferably, N. meningitidis).

### BACKGROUND ART

[0005] References 1 to 6 disclose antigens, proteins and open reading frames from Neisseria bacteria, including N. gonorrhoeae and serogroups A and B of N. meningitidis. References 7 to 9 disclose various ways of expressing these proteins. Reference 10 discloses the enhancement of immunogenicity of Neisseria antigens when CpG adjuvants are used as adjuvants.

[0006] It is an object of the present invention to provide alternative and improved ways of enhancing immune responses raised against antigens from Neisseria, particularly N. meningitidis serogroup B.

### DISCLOSURE OF THE INVENTION

[0007] The invention provides a composition comprising a Neisserial antigen and a detoxified ADP-ribosylating toxin. These compositions have been found to be useful for mucosal immunization.

[0008] The composition is preferably an immunogenic composition, and more preferably a vaccine.

[0009] The Neisserial Antigen

[0010] The Neisserial antigen is preferably an N. meningitidis antigen, and more preferably an N. meningitidis serogroup B antigen. Within serogroup B, preferred strains are 2996, MC58, 95N477, or 394/98.

[0011] The Neisserial antigen is preferably a protein antigen. More preferably, the protein antigen is selected from the group consisting of:
[0012] (a) a protein comprising one or more of the 446 even SEQ IDs (i.e., 2, 4, 6, . . . , 890, 892) disclosed in reference 1.
[0013] (b) a protein comprising one or more of the 45 even SEQ IDs (i.e., 2, 4, 6, . . . , 88, 90) disclosed in reference 2;
[0014] (c) a protein comprising one or more of the 1674 even SEQ IDs 2-3020, even SEQ IDs 3040-3114, and all SEQ IDs 3115-3241 disclosed in reference 3;
[0015] (d) a protein comprising one or more of the 2160 amino acid sequences NMB0001 to NMB2160 disclosed in reference 5;
[0016] (e) a protein comprising an amino acid sequence having sequence identity to an amino acid sequence specified in (a), (b), (c) or (d);
[0017] (f) a protein comprising a fragment of an amino acid sequence specified in (a), (b), (c) or (d);
[0018] (g) a protein comprising one or more of the amino acid sequences disclosed in reference 7, reference 8 or reference 9; or
[0019] (h) a protein having formula NH2-A-[-X-L-]n-B—COOH, wherein X is an amino acid sequence, L is an optional linker amino acid sequence, A is an optional N-terminal amino acid sequence, B is an optional C-terminal amino acid sequence, and n is an integer greater than 1.

[0020] The degree of ‘sequence identity’ referred to in (e) is preferably greater than 50% (e.g., 60%, 70%, 80%, 90%, 95%, 99% or more, up to 100%). This includes mutants, homologs, orthologs, allelic variants etc. [e.g., see reference 11]. Identity is preferably determined by the Smith-Waterman homology search algorithm as implemented in the MPSRCH program (Oxford Molecular), using an affine gap search with parameters gap open penalty=12 and gap extension penalty=1. Typically, 50% identity or more between two proteins is considered to be an indication of functional equivalence.

[0021] The ‘fragment’ referred to in (f) should consist of least m consecutive amino acids from an amino acid sequence from (a), (b), (c), (d) or (e) and, depending on the particular sequence, m is 7 or more (e.g., 8, 10, 12, 14, 16, 18, 20, 25, 30, 35, 40, 50, 60, 70, 80, 90, 100, 150, 200 or more). Preferably the fragment comprises an epitope from an amino acid sequence from (a), (b), (c) or (d).

[0022] Preferred fragments are those disclosed in references 12 and 13. Other preferred fragments are C- and/or N-terminal truncations (e.g., Δ1-287, Δ2-287 etc.). Other preferred fragments omit poly-glycine sequences from the full-length sequence. This has been found to aid expression [ref. 8]. Poly-glycine sequences can be represented as (Gly)_{g}, where g≧3 (e.g., 4, 5, 6, 7, 8, 9 or more). If a —X— moiety in (h) includes a poly-glycine sequence in its wild-type form, it is preferred to omit this sequence in the hybrid proteins of the invention. This may be by disrupting or removing the (Gly)_{g}—by deletion (e.g., CGGGGS→CGGGS, CGGS, CGS or CS), by substitution (e.g., CGGGGS→CGXGGS, CGXXGS, CGXGXS etc.), and/or by insertion (e.g., CGGGGS→CGGXGGS, CGXGGGS, etc.). Deletion of (Gly)_{g} is preferred, and this deletion is referred to herein as ‘ΔG’, particularly deletion of the whole N-terminus up to and including the (Gly)_{g}. Poly-glycine omission is particularly useful for proteins 287, 741, 983 and Tbp2 (ΔG287, ΔG741, ΔG983 and ΔGTbp2 [8]).

[0023] Other preferred fragments omit a leader peptide sequence from the full-length wild-type protein. This is particularly useful for proteins in group (h). In preferred proteins of group (h), all leader peptides in —X— moieties will be deleted except for that of the —X— moiety which is located at the N-terminus, i.e., the leader peptide of X₁ will be retained, but the leader peptides of X₂ . . . Xₙ will be omitted. This is equivalent to deleting all leader peptides and using the leader peptide of X₁ as moiety -A-.

[0024] Other preferred fragments omit complete protein domains. This is particularly useful for protein 961 (‘NadA’), 287, and ORF46.1. Once a protein has been notional divided into domains, (c) and (j) fragments can omit one or more of these domains (e.g. 287B, 287C, 287BC, ORF46₁₋₄₃₃, ORF46₄₃₃₋₆₀₈, ORF46, 961c—reference 8; FIGS. 8 and 9 in reference 9). 287 protein has been notionally split into three domains, referred to as A, B & C (see FIG. 5 of reference 8). Domain B aligns strongly with IgA proteases, domain C aligns strongly with transferrin-binding proteins, and domain A shows no strong alignment with database sequences. An alignment of polymorphic forms of 287 is disclosed in reference 11. ORF46.1 has been notionally split into two domains—a first domain (amino acids 1-433) which is well-conserved between species and serogroups, and a second domain (amino acids 433-608) which is not well-conserved. The second domain is preferably deleted. An alignment of polymorphic forms of ORF46.1 is disclosed in reference 11. 961 protein has been notionally split into several domains (FIG. 8 of reference 9).

[0025] Particularly preferred proteins in groups (a) to (d) comprise the amino acid sequence of (using the nomenclatures of references 1 to 9): orf1, orf4, orf25, orf40, orf46.1, orf83, NMB1343, 230, 233, 287, 292, 594, 687, 736, 741, 907, 919, 936, 953, 961 or 983. A preferred subset of these is: orf46.1, 230, 287, 741, 919, 936, 953, 961 and 983. A more preferred subset is: orf46.1, 287, 741 and 961.

[0026] In relation to group (h), the value of n is between 2 and x, and the value of x is typically 3, 4, 5, 6, 7, 8, 9 or 10. Preferably n is 2, 3 or 4; it is more preferably 2 or 3; most preferably, n=2. Each —X— moiety is an amino acid sequence as specified in (a), (b), (c) or (d).

[0027] When n=2, preferred pairs of —X— moieties are: ΔG287 and 230; ΔG287 and 936; ΔG287 and 741; 961c and 287; 961c and 230; 961c and 936; 961cL and 287; 961cL and 230; 961cL and 936; ORF46.1 and 936; ORF46.1 and 230; 230 and 961; 230 and 741; 936 and 961; 936 and 741; ΔG741 and 741; ΔG287 and 287. Particularly preferred proteins are disclosed in references 14 and 15.

[0028] Where 287 is used in full-length form, it is preferably the final —Xₙ— moiety; if it is to be used at the N-terminus (i.e. as —X₁—), it is preferred to use a ΔG form of 287.

[0029] For each n instances of [—X-L-], linker amino acid sequence -L- may be present or absent. For instance, when n=2 the hybrid may be NH₂—X₁-L₁-X₂-L₂-COOH, NH₂—X₁—X₂—COOH, NH₂—X₁-L₁-X₂—COOH, NH₂—X₁—X₂-L₂-COOH, etc.

[0030] Linker amino acid sequence(s) -L- will typically be short (e.g. 20 or fewer amino acids i.e. 19, 18, 17, 16, 15, 14, 13, 12, 11, 10, 9, 8, 7, 6, 5, 4, 3, 2, 1). Examples include short peptide sequences which facilitate cloning, poly-glycine linkers (i.e. Glyₙ where n=2, 3, 4, 5, 6, 7, 8, 9, 10 or more), and histidine tags (i.e. Hisₙ where n=3, 4, 5, 6, 7, 8, 9, 10 or more). Other suitable linker amino acid sequences will be apparent to those skilled in the art.

[0031] If Xₙ₊₁ is a ΔG protein and Lₙ is a glycine linker, this may be equivalent to Xₙ₊₁ not being a ΔG protein and Lₙ being absent.

[0032] -A- is an optional N-terminal amino acid sequence. This will typically be short (e.g. 40 or fewer amino acids i.e. 39, 38, 37, 36, 35, 34, 33, 32, 31, 30, 29, 28, 27, 26, 25, 24, 23, 22, 21, 20, 19, 18, 17, 16, 15, 14, 13, 12, 11, 10, 9, 8, 7, 6, 5, 4, 3, 2, 1). Examples include leader sequences to direct protein trafficking, or short peptide sequences which facilitate cloning or purification (e.g. histidine tags i.e. Hisₙ where n=3, 4, 5, 6, 7, 8, 9, 10 or more). Other suitable N-terminal amino acid sequences will be apparent to those skilled in the art.

[0033] —B— is an optional C-terminal amino acid sequence. This will typically be short (e.g. 40 or fewer amino acids i.e. 39, 38, 37, 36, 35, 34, 33, 32, 31, 30, 29, 28, 27, 26, 25, 24, 23, 22, 21, 20, 19, 18, 17, 16, 15, 14, 13, 12, 11, 10, 9, 8, 7, 6, 5, 4, 3, 2, 1). Examples include sequences to direct protein trafficking, short peptide sequences which facilitate cloning or purification (e.g. histidine tags i.e. Hisₙ where n=3, 4, 5, 6, 7, 8, 9, 10 or more), or sequences which enhance protein stability. Other suitable C-terminal amino acid sequences will be apparent to those skilled in the art.

[0034] The invention can use amino acid sequences from any strain of N. meningitidis. References to a particular protein (e.g. ‘287’, or ‘ORF46.1’) therefore include that protein from any strain. Sequence variations between strains are included within (e) and (f).

[0035] Prototype sequences from N. meningitidis serogroup B include:

| Protein | Prototype | Protein | Prototype |
|---|---|---|---|
| orf1 | Ref. 1, SEQ ID 650 | orf4 | Ref. 1, SEQ ID 218 |
| orf25 | Ref. 1, SEQ ID 684 | orf40 | Ref. 2, SEQ ID 4 |
| orf46.1 | Ref. 8, Example 8 | orf83 | Ref. 1, SEQ ID 314 |
| NMB1343 | Ref. 5, NMB1343 | 230 | Ref. 3, SEQ ID 830 |
| 233 | Ref. 3, SEQ ID 860 | 287 | Ref. 3, SEQ ID 3104 |
| 292 | Ref. 3, SEQ ID 1220 | 594 | Ref. 3, SEQ ID 1862 |
| 687 | Ref. 3, SEQ ID 2282 | 736 | Ref. 3, SEQ ID 2506 |
| 741 | Ref. 3, SEQ ID 2536 | 907 | Ref. 3, SEQ ID 2732 |
| 919 | Ref. 3, SEQ ID 3070 | 936 | Ref. 3, SEQ ID 2884 |
| 953 | Ref. 3, SEQ ID 2918 | 961 | Ref. 3, SEQ ID 940 |
| 983 | Ref. 5, NMB1969 | | |

[0036] Reference 11 discloses polymorphic forms of proteins ORF4, ORF40, ORF46, 225, 235, 287, 519, 726, 919 and 953. Polymorphic forms of 961 are disclosed in references 16 and 17. Reference 9 discloses polymorphic forms of 741, 961 and NMB1343. Reference 15 discloses polymorphic forms of 741. Any of these polymorphic forms may be used in accordance with the present invention.

[0037] Neisserial protein antigens are expressed in Neisseria, but the invention preferably utilises a heterologous host to express the antigen. The heterologous host may be prokaryotic (e.g. a bacterium) or eukaryotic. It is preferably E. coli, but other suitable hosts include Bacillus subtilis, Vibrio cholerae, Salmonella typhi, Salmonenna typhimurium, Neisseria lactamica, Neisseria cinerea, Mycobacteria (e.g. M. tuberculosis), yeast, etc.

[0038] The Detoxified ADP-Ribosylating Toxin

[0039] ADP-ribosylating bacterial exotoxins are widely known. Examples include diphtheria toxin (Corynebacterium diphtheriae), exotoxin A (Pseudomonas aeruginosa), cholera toxin (CT; Vibrio cholerae), heat-labile enterotoxin (LT; E. coli) and pertussis toxin (PT).

[0040] The toxins catalyse the transfer of an ADP-ribose unit from NAD⁺ to a target protein.

[0041] The toxins are typically divided into two functionally distinct domains—A and B. The A subunit is responsible for the toxic enzymatic activity, whereas the B subunit is responsible for cellular binding. The subunits might be domains on the same polypeptide chain, or might be separate polypeptide chains. The subunits may themselves be oligomers e.g. the A subunit of CT consists of A₁ and A₂ which are linked by a disulphide bond, and its B subunit is a homopentamer. Typically, initial contact with a target cell is mediated by the B subunit and then subunit A alone enters the cell.

[0042] The toxins are typically immunogenic, but their inclusion in vaccines is hampered by their toxicity. To remove toxicity without also removing immunogenicity, the toxins have been treated with chemicals such as glutaraldehyde or formaldehyde. A more rational approach relies on site-directed mutagenesis of key active site residues to remove toxic enzymatic activity whilst retaining immunogenicity [e.g. refs. 18 (CT and LT), 19 (PT), 20 etc.]. Current acellular whooping cough vaccines include a form of pertussis toxin with two amino acid substitutions (Arg⁹→Lys and Glu¹²⁹→Gly; ‘PT-9K/129G’ [21]).

[0043] As well as their immunogenic properties, the toxins have been used as adjuvants. Parenteral adjuvanticity was first observed in 1972 [22] and mucosal adjuvanticity in 1984 [23]. It was surprisingly found in 1993 that the detoxified forms of the toxins retain adjuvanticity [24].

[0044] The compositions of the invention include a detoxified ADP-ribosylating toxin. The toxin may be diphtheria toxin, Pseudomonas exotoxin A or pertussis toxin, but is preferably cholera toxin (CT) or, more preferably, E. coli heat-labile enterotoxin (LT). Other toxins which can be used are those disclosed in reference 25 (SEQ IDs 1 to 7 therein).

[0045] Detoxification of these toxins without loss of immunogenic and/or adjuvant activity can be achieved by any suitable means, with mutagenesis being preferred. Mutagenesis may involve one or more substitutions, deletions and/or insertions.

[0046] Preferred detoxified mutants are LT having a mutation at residue Arg-7 (e.g. a Lys substitution); CT having a mutation at residue Arg-7 (e.g. a Lys substitution); CT having a mutation at residue Arg-11 (e.g. a Lys substitution); LT having a mutation at Val-53; CT having a mutation at Val-53; CT having a mutation at residue Ser-61 (e.g. a Phe substitution); LT having a mutation at residue Ser-63 (e.g. a Lys or Tyr substitution) [e.g. Chapter 5 of ref. 26—K63]; CT having a mutation at residue Ser-63 (e.g. a Lys or Tyr substitution); LT having a mutation at residue Ala-72 (e.g. an Arg substitution) [27—R72]; LT having a mutation at Val-97; CT having a mutation at Val-97; LT having a mutation at Tyr-104; CT having a mutation at Tyr-104; LT having a mutation at residue Pro-106 (e.g. a Ser substitution); CT having a mutation at residue Pro-106 (e.g. a Ser substitution); LT having a mutation at Glu-112 (e.g. a Lys substitution); CT having a mutation at Glu-112 (e.g. a Lys substitution); LT having a mutation at residue Arg-192 (e.g. a Gly substitution); PT having a mutation at residue Arg-9 (e.g. a Lys substitution); PT having a mutation at Glu-129 (e.g. a Gly substitution); and any of the mutants disclosed in reference 18.

[0047] These mutations may be combined e.g. Arg-9-Lys+Glu-129-Gly in PT.

[0048] LT with a mutation at residue 63 or 72 is a preferred detoxified toxin.

[0049] It will be appreciated that the numbering of these residues is based on prototype sequences and that, for example, although Ser-63 may not actually be the 63rd amino acid in a given LT variant, an alignment of amino acid sequences will reveal the location corresponding to Ser-63.

[0050] The detoxified toxins may be in the form of A and/or B subunits as appropriate for activity.

[0051] Mucosal Administration

[0052] The composition of the invention is particularly suited to mucosal immunisation, although parenteral immunisation is also possible. Suitable routes of mucosal administration include oral, intranasal, intragastric, pulmonary, intestinal, rectal, ocular, and vaginal routes. Oral or intranasal administration is preferred.

[0053] The composition is preferably adapted for mucosal administration [e.g. see refs. 28, 29 & 30]. Where the composition is for oral administration, for instance, it may be in the form of tablets or capsules (optionally enteric-coated), liquid, transgenic plants etc. [see also ref. 31, and Chapter 17 of ref. 32].

[0054] Where the composition is for intranasal administration, it may be in the form of a nasal spray, nasal drops, gel or powder etc [e.g. ref. 33].

[0055] Further Components of the Composition

[0056] The composition of the invention will typically, in addition to the antigen and toxin components mentioned above, comprise one or more ‘pharmaceutically acceptable carriers’, which include any carrier that does not itself induce the production of antibodies harmful to the individual receiving the composition. Suitable carriers are typically large, slowly metabolised macromolecules such as proteins, polysaccharides, polylactic acids, polyglycolic acids, polymeric amino acids, amino acid copolymers, trehalose and lipid aggregates (such as oil droplets or liposomes). Such carriers are well known to those of ordinary skill in the art. The vaccines may also contain diluents, such as water, saline, glycerol, etc. Additionally, auxiliary substances, such as wetting or emulsifying agents, pH buffering substances, and the like, may be present. A thorough discussion of pharmaceutically acceptable excipients is available in Remington's Pharmaceutical Sciences.

[0057] Immunogenic compositions used as vaccines comprise an immunologically effective amount of antigen, as well as any other of the above-mentioned components, as needed. By ‘immunologically effective amount’, it is meant that the administration of that amount to an individual, either in a single dose or as part of a series, is effective for treatment or prevention. This amount varies depending upon the health and physical condition of the individual to be treated, age, the taxonomic group of individual to be treated (e.g. non-human primate, primate, etc.), the capacity of the individual's immune system to synthesise antibodies, the degree of protection desired, the formulation of the vaccine, the treating doctor's assessment of the medical situation, and other relevant factors. It is expected that the amount will fall in a relatively broad range that can be determined through routine trials. Dosage treatment may be a single dose schedule or a multiple dose schedule (e.g. including booster doses). The vaccine may be administered in conjunction with other immunoregulatory agents.

[0058] The composition may include other adjuvants in addition to detoxified toxin. Preferred adjuvants to enhance effectiveness of the composition include, but are not limited to: (1) oil-in-water emulsion formulations (with or without other specific immunostimulating agents such as muramyl peptides (see below) or bacterial cell wall components), such as for example (a) MF59™ (WO90/14837; Chapter 10 in ref. 32), containing 5% Squalene, 0.5% Tween 80, and 0.5% Span 85 (optionally containing MTP-PE) formulated into submicron particles using a microfluidizer, (b) SAF, containing 10% Squalane, 0.4% Tween 80, 5% pluronic-blocked polymer L121, and thr-MDP either microfluidized into a submicron emulsion or vortexed to generate a larger particle size emulsion, and (c) Ribi™ adjuvant system (RAS), (Ribi Immunochem, Hamilton, Mont.) containing 2% Squalene, 0.2% Tween 80, and one or more bacterial cell wall components from the group consisting of monophosphorylipid A (MPL), trehalose dimycolate (TDM), and cell wall skeleton (CWS), preferably MPL+CWS (Detox™); (2) saponin adjuvants, such as QS21 or Stimulon™ (Cambridge Bioscience, Worcester, Mass.) may be used or particles generated therefrom such as ISCOMs (immunostimulating complexes), which ISCOMS may be devoid of additional detergent e.g. WO00/07621; (3) Complete Freund's Adjuvant (CFA) and Incomplete Freund's Adjuvant (IFA); (4) cytokines, such as interleukins (e.g. IL-1, IL-2, IL-4, IL-5, IL-6, IL-7, IL-12 (WO99/44636), etc.), interferons (e.g. gamma interferon), macrophage colony stimulating factor (M-CSF), tumor necrosis factor (TNF), etc.; (5) monophosphoryl lipid A (MPL) or 3-O-deacylated MPL (3dMPL) e.g. GB-2220221, EP-A-0689454; (6) combinations of 3dMPL with, for example, QS21 and/or oil-in-water emulsions e.g. EP-A-0835318, EP-A-0735898, EP-A-0761231; (7) oligonucleotides comprising CpG motifs [Krieg Vaccine 2000, 19, 618-622; Krieg Curr opin Mol Ther 2001 3:15-24; Roman et al., Nat. Med., 1997, 3, 849-854; Weiner et al., PNAS USA, 1997, 94, 10833-10837; Davis et al., J. Immunol., 1998, 160, 870-876; Chu et al., J. Exp. Med., 1997, 186, 1623-1631; Lipford et al., Eur. J. Immunol., 1997, 27, 2340-2344; Moldoveanu et al., Vaccine, 1988, 16, 1216-1224, Krieg et al., Nature, 1995, 374, 546-549; Klinman et al., PNAS USA, 1996, 93, 2879-2883; Ballas et al., J. Immunol., 1996, 157, 1840-1845; Cowdery et al., J. Immunol., 1996, 156, 4570-4575; Halpern et al., Cell. Immunol., 1996, 167, 72-78; Yamamoto et al., Jpn. J. Cancer Res., 1988, 79, 866-873; Stacey et al., J. Immunol., 1996, 157, 2116-2122; Messina et al., J. Immunol., 1991, 147, 1759-1764; Yi et al., J. Immunol., 1996, 157, 4918-4925; Yi et al., J. Immunol., 1996, 157, 5394-5402; Yi et al., J. Immunol., 1998, 160, 4755-4761; and Yi et al., J. Immunol., 1998, 160, 5898-5906; International patent applications WO96/02555, WO98/16247, WO98/18810, WO98/40100, WO98/55495, WO98/37919 and WO98/52581] i.e. containing at least one CG dinucleotide, with 5-methylcytosine optionally being used in place of cytosine; (8) a polyoxyethylene ether or a polyoxyethylene ester e.g. WO99/52549; (9) a polyoxyethylene sorbitan ester surfactant in combination with an octoxynol (e.g. WO01/21207) or a polyoxyethylene alkyl ether or ester surfactant in combination with at least one additional non-ionic surfactant such as an octoxynol (e.g. WO01/21152); (10) an immunostimulatory oligonucleotide (e.g. a CpG oligonucleotide) and a saponin e.g. WO00/62800; (11) an immunostimulant and a particle of metal salt e.g. WO00/23105; (12) a saponin and an oil-in-water emulsion e.g. WO99/11241; (13) a saponin (e.g. QS21)+3dMPL+IL-12 (optionally+a sterol) e.g. WO98/57659; (14) PLG microparticles; (15) other substances that act as immunostimulating agents to enhance the efficacy of the composition.

[0059] Muramyl peptides include N-acetyl-muramyl-L-threonyl-D-isoglutamine (thr-MDP), N-acetyl-normuramyl-L-alanyl-D-isoglutamine (nor-MDP), N-acetylmuramyl-L-alanyl-D-isoglutaminyl-L-alanine-2-(1′-2′-dipalmitoyl-sn-glycero-3-hydroxyphosphoryloxy)-ethylamine MTP-PE), etc.

[0060] Compositions of the invention preferably comprise a buffer. Compositions of the invention are preferably buffered at between pH 6 and pH 8 (e.g. at about pH 7).

[0061] Compositions of the invention are preferably sterile and/or pyrogen-free.

[0062] Further Antigens

[0063] Further antigens which can be included in the composition of the invention include:
[0064] an outer-membrane vesicle (OMV) preparation from N. meningitidis serogroup B, such as those disclosed in refs. 34, 35, 36, 37 etc.
[0065] a saccharide antigen from N. meningitidis serogroup A, C, W135 and/or Y, such as the oligosaccharide disclosed in ref. 38 from serogroup C [see also ref. 39].
[0066] a saccharide antigen from Streptococcus pneumoniae [e.g. refs. 40, 41, 42].
[0067] a protein antigen from Helicobacter pylori such as CagA [e.g. 43], VacA [e.g. 43], NAP [e.g. 44], HopX [e.g. 45], HopY [e.g. 45] and/or urease.
[0068] an antigen from hepatitis A virus, such as inactivated virus [e.g. 46, 47].
[0069] an antigen from hepatitis B virus, such as the surface and/or core antigens [e.g. 47, 48].
[0070] an antigen from hepatitis C virus [e.g. 49].
[0071] an antigen from Bordetella pertussis, such as pertussis holotoxin (PT) and filamentous haemagglutinin (FHA) from B. pertussis, optionally also in combination with pertactin and/or agglutinogens 2 and 3 [e.g. refs. 50 & 51].
[0072] a diphtheria antigen, such as a diphtheria toxoid [e.g. chapter 3 of ref. 52] e.g. the CRM₁₉₇ mutant [e.g. 26].
[0073] a tetanus antigen, such as a tetanus toxoid [e.g. chapter 4 of ref. 52].
[0074] a saccharide antigen from Haemophilus influenzae B [e.g. 39].
[0075] an antigen from N. gonorrhoeae [e.g. 1, 2, 3].
[0076] an antigen from Chlamydia pneumoniae [e.g. 53, 54, 55, 56, 57, 58, 59].
[0077] an antigen from Chlamydia trachomatis [e.g. 60].
[0078] an antigen from Porphyromonas gingivalis [e.g. 61].
[0079] polio antigen(s) [e.g. 62, 63] such as IPV or OPV.
[0080] rabies antigen(s) [e.g. 64] such as lyophilised inactivated virus [e.g.65, RabAvert™].
[0081] measles, mumps and/or rubella antigens [e.g. chapters 9, 10 & 11 of ref. 52].
[0082] influenza antigen(s) [e.g. chapter 19 of ref. 52], such as the haemagglutinin and/or neuraminidase surface proteins.
[0083] an antigen from Moraxella catarrhalis [e.g. 66].
[0084] an antigen from Streptococcus agalactiae (group B streptococcus) [e.g. 67, 68].
[0085] an antigen from Streptococcus pyogenes (group A streptococcus) [e.g. 68, 69, 70].
[0086] an antigen from Staphylococcus aureus [e.g. 71].

[0087] The composition may comprise one or more of these further antigens.

[0088] Where a saccharide or carbohydrate antigen is used, it is preferably conjugated to a carrier protein in order to enhance immunogenicity [e.g. refs. 72 to 81]. Preferred carrier proteins are bacterial toxins or toxoids, such as diphtheria or tetanus toxoids. The CRM₁₉₇ diphtheria toxoid is particularly preferred. Other suitable carrier proteins include the N. meningitidis outer membrane protein [e.g. ref. 82], synthetic peptides [e.g. 83, 84], heat shock proteins [e.g. 85], pertussis proteins [e.g. 86, 87], protein D from H. influenzae [e.g. 88], toxin A or B from C. difficile [e.g. 89], etc. Where a mixture comprises capsular saccharides from both serogroups A and C, it is preferred that the ratio (w/w) of MenA saccharide:MenC saccharide is greater than 1 (e.g. 2:1, 3:1, 4:1, 5:1, 10:1 or higher). Saccharides from different serogroups of N. meningitidis may be conjugated to the same or different carrier proteins.

[0089] Any suitable conjugation reaction can be used, with any suitable linker where necessary.

[0090] Toxic protein antigens may be detoxified where necessary (e.g. detoxification of pertussis toxin by chemical and/or genetic means [51]).

[0091] Where a diphtheria antigen is included in the composition it is preferred also to include tetanus antigen and pertussis antigens. Similarly, where a tetanus antigen is included it is preferred also to include diphtheria and pertussis antigens. Similarly, where a pertussis antigen is included it is preferred also to include diphtheria and tetanus antigens.

[0092] Antigens are preferably mixed with (and more preferably adsorbed to) an aluminium salt (e.g. phosphate, hydroxide, hydroxyphosphate, oxyhydroxide, orthophosphate, sulphate). The salt may take any suitable form (e.g. gel, crystalline, amorphous etc.).

[0093] Antigens in the composition will typically be present at a concentration of at least 1 μg/ml each. In general, the concentration of any given antigen will be sufficient to elicit an immune response against that antigen.

[0094] As an alternative to using proteins antigens in the composition of the invention, nucleic acid encoding the antigen may be used [e.g. refs. 90 to 98]. Protein components of the compositions of the invention may thus be replaced by nucleic acid (preferably DNA e.g. in the form of a plasmid) that encodes the protein. Such nucleic acid can be prepared in many ways (eg. by chemical synthesis, from genomic or cDNA libraries, from the organism itself etc.) and can take various forms (eg. single stranded, double stranded, vectors, probes etc.). The term “nucleic acid” includes DNA and RNA, and also their analogues, such as those containing modified backbones, and also peptide nucleic acids (PNA) etc.

[0095] Medicaments

[0096] The composition of the invention is typically a vaccine composition.

[0097] The invention provides the compositions defined above for use as medicaments. The medicament is preferably able to raise an immune response in a mammal against the antigen (i.e. it is an immunogenic composition) and is more preferably a vaccine.

[0098] The invention provides the use of the compositions defined above in the manufacture of a medicament for treating or preventing infection due to Neisseria bacteria (preferably N. meningitidis).

[0099] The invention provides a method of raising an immune response in an animal (e.g. a mammal, such as a mouse or a human), comprising administering to the animal a composition of the invention. The immune response is preferably protective. The animal is preferably 0-3 years old.

[0100] The invention provides a method of treating a patient, comprising administering to the patient a therapeutically effective amount of a composition of the invention.

[0101] Vaccines according to the invention may either be prophylactic (i.e. to prevent infection) or therapeutic (i.e. to treat disease after infection), but will typically be prophylactic.

[0102] These uses and methods etc. are preferably for the prevention and/or treatment of a disease caused by a Neisseria (e.g. meningitis, septicaemia, gonorrhoea etc.). The prevention and/or treatment of bacterial meningitis is preferred.

[0103] The efficacy of an immunogenic composition can be assessed by monitoring antigen-specific immune responses (e.g. T cell or antibody responses) raised in an animal following administration of the composition.

[0104] The generation of bactericidal antibodies in an animal following administration of a composition of the invention is also indicative of efficacy.

[0105] Definitions

[0106] The term “comprising” means “including” as well as “consisting” e.g. a composition “comprising” X may consist exclusively of X or may include something additional e.g. X+Y.

[0107] The term “about” in relation to a numerical value x means, for example, x±10%.

### BRIEF DESCRIPTION OF DRAWINGS

[0108] FIGS. 1 to 4 show IFN-γ (FIGS. 1 & 3; ng/ml) and IL-5 (FIGS. 2 and 4; pg/ml) levels induced by orf1 (FIGS. 1 & 2) and orf40 (FIGS. 3 and 4). For FIGS. 1 & 2, there are four data sets on the X-axis (left to right: PBS; orf1; orf1+1 μg/ml LT-K63; orf1+1 μg/ml LT-R72), each of which has three values for different antigen concentrations (left to right: 0.1 μg/ml; 10 μg/ml; 100 μ/ml). For FIGS. 3 & 4, there are five data sets on the X-axis (left to right: PBS; orf40; orf40+1 μg/ml LT-K63; orf40+10 μg/ml LT-K63; orf40+1 μg/ml LT-R72), each of which has three values for different antigen concentrations (left to right: 0.1 μg/ml; 10 μg/ml; 100 μg/ml).

[0109] FIG. 5 shows IgG titres (log₁₀) induced by orf1 and orf40. The seven columns are, from left to right: orf1; orf1+1 μg/ml LT-K63; 1 μg/ml LT-R72; orf40; orf40+1 μg/ml LT-K63; orf40+10 μg/ml LT-K63; orf40+1 μg/ml LT-R72.

[0110] FIG. 6 shows the IgG antibody subclass responses against ORF40. The four data sets are the same as the right-hand four sets in FIG. 5. In each data set, the left-hand column shows IgG1 and the right-hand column shows IgG2a.

### MODES FOR CARRYING OUT THE INVENTION

[0111] Intranasal Immunisation with N. meningitidis Protein Antigens

[0112] Groups of five female Balb/c mice were immunised intranasally under ether anaesthesia on days 0, 21 and 42 with compositions comprising: (a) N. meningitidis (serogroup B) antigen orf1 or orf40; and (b) E. coli heat label toxin mutant R72 or K63. Negative control mice received either PBS or antigen without LT adjuvant. The groups were as follows:

| Group | Antigen | Adjuvant |
|---|---|---|
| 1 | — | — |
| 2 | Orf1 | — |
| 3 | Orf1 | LT-K63 (1 μg) |
| 4 | Orf1 | LT-R72 (1 μg) |
| 5 | Orf40 | — |
| 6 | Orf40 | LT-K63 (1 μg) |
| 7 | Orf40 | LT-K63 (10 μg) |
| 8 | Orf40 | LT-R72 (1 μg) |

[0113] Antigens (5 μg/mouse) and adjuvants were delivered in a dose of 20 μl per mouse.

[0114] Two weeks after the final immunisation, animals were sacrificed and blood, spleens and cervical lymph nodes were taken from mice. Sera was collected and stored for analysis of orf1/orf40-specific IgG, IgG1 and IgG2a by ELISA. Single cell suspensions were prepared from the spleens and cervical lymph nodes. The cells were set up in 96 well plates with orf1 or orf40 at 0, 0.1, 10 and 100 μg/ml. As a positive control, the cells were incubated with PMA and anti-CD3. Cells were incubated at 37° C. with 5% CO₂ for 3 days. On day 3, supernatants were collected for analysis of IL4, IL5 and interferon γ (IFNγ). ³H-thymidine was added to the cells and plates were further incubated for 4 hr to allow an estimation of antigen-specific proliferation (data not shown).

[0115] Re-stimulated splenocytes from mice immunised with orf1 produced IFNγ and small amounts of IL-5 (FIGS. 1 & 2). When mice were immunised with orf1 and LTK63 and in particular with LTR72 the cytokine responses were considerably stronger.

[0116] In contrast, immunisation with the antigen alone or together with the LT mutants did not lead to the production of significant levels of specific antibody (FIG. 5).

[0117] Immunisation with orf40 alone elicited a specific antibody response (FIG. 5). This was mainly of the IgG1 subclass (FIG. 6). Re-stimulated splenocytes from these mice did not produce significant amounts of IL-5 or IFNγ (FIGS. 3 & 4). Immunisation with orf40 and LTK63 (1 μg) resulted in a large increase in IL-5 production and increased IFNγ. Immunisation with orf40 and 10 μg of LTK63 led to a higher IFNγ concentration in supernatants. Restimulated splenocytes from mice immunised with orf 40 and LTR72 (1 μg) secreted IL-5 and IFNγ at concentrations comparable to those from mice immunised with the higher dose of LTK63. Sera from these mice contained high titres of specific IgG1 and IgG2a. In contrast, sera from mice immunised with orf40 and LTK63 contained higher titres of specific IgG1 than immunisation with the antigen alone. However, titres of specific IgG2a were not enhanced. Immunisation with the 10 μg dose of LTK63 resulted in higher titres of specific IgG2a. This correlated with the higher production of IFNγ in this group. The individual titres of orf40-specific IgG1 and IgG2a are presented in Table 1. These will be required to set up the assays for bactericidal antibody titres.

TABLE 1
Individual IgG1 and IgG2a subclass titres from mice immunised with orf40 alone
or together with LTK63/LTR72

| orf40 only | | orf40 + K63 (1 μg) | | orf40 + K63 (10 μg) | | Orf40 + R72 (1 μg) | |
|---|---|---|---|---|---|---|---|
| IgG1 | IgG2a | IgG1 | IgG2a | IgG1 | IgG2a | IgG1 | IgG2a |
| 1 | 1 | 25000 | 1 | 100000 | 2500 | 15000 | 100 |
| 600 | 1 | 40000 | 1 | 100000 | 15000 | 15000 | 900 |
| 1500 | 1 | 60000 | 1 | 100000 | 35000 | 50000 | 9000 |
| 4000 | 1 | 80000 | 2500 | 150000 | 70000 | 150000 | 10000 |
| 30000 | 1000 | 100000 | 25000 | 500000 | 80000 | 800000 | 150000 |

[0118] It will be understood that the invention has been described by way of example only and modifications may be made whilst remaining within the scope and spirit of the invention.

### REFERENCES

[0119] (The Contents of Which are Hereby Incorporated by Reference)

[0120] 1—International patent application WO99/24578.

[0121] 2—International patent application WO99/36544.

[0122] 3—International patent application WO99/57280.

[0123] 4—International patent application WO00/22430.

[0124] 5—Tettelin et al. (2000) Science 287:1809-1815.

[0125] 6—Pizza et al. (2000) Science 287:1816-1820.

[0126] 7—International patent application WO01/64920.

[0127] 8—International patent application WO01/64922.

[0128] 9—International patent application PCT/IB02/03904.

[0129] 10—International patent application WO00/50075.

[0130] 11—International patent application WO00/66741.

[0131] 12—International patent application WO00/71574.

[0132] 13—International patent application WO01/04316.

[0133] 14—United Kingdom patent application 0223741.0.

[0134] 15—United Kingdom patent application 0227346.4.

[0135] 16—International patent application PCT/IB02/03396

[0136] [17] Comanducci et al. (2002) J. Exp. Med. 195:1445-1454.

[0137] 18—International patent application WO93/13202.

[0138] 19—European patent applications 0306618, 0322533 and 0322115.

[0139] 20—Del Giudice & Rappuoli (1999) Vaccine 1999 17 Suppl 2:S44-52

[0140] 21—European patent 0396964.

[0141] 22—Northrup & Fauci (1972) J. Infect. Dis. 125:672ff.

[0142] 23—Elson & Ealding (1984) J. Immunol. 133:2892ff and 132:2736ff.

[0143] 24—International patent application WO95/17211.

[0144] 25—International patent application WO02/079242.

[0145] 26—Del Giudice et al. (1998) Molecular Aspects of Medicine, vol. 19, number 1.

[0146] 27—International patent application WO98/18928.

[0147] 28—Walker (1994) Vaccine 12:387-400.

[0148] 29—Clements (1997) Nature Biotech. 15:622-623.

[0149] 30—McGhee et al. (1992) Vaccine 10:75-88.

[0150] 31—Michetti (1998) J. Gastroenterol. [Suppl X]:66-68.

[0151] 32—Vaccine design: the subunit and adjuvant approach, eds. Powell & Newman, Plenum Press 1995 (ISBN 0-306-44867-X.

[0152] 33—Almeida & Alpar (1996) J. Drug Targeting 3:455-467.

[0153] 34—International patent application WO01/52885.

[0154] 35—Bjune et al. (1991) Lancet 338(8775):1093-1096.

[0155] 36—Fukasawa et al. (1999) Vaccine 17:2951-2958.

[0156] 37—Rosenqvist et al. (1998) Dev. Biol. Stand. 92:323-333.

[0157] 38—Costantino et al. (1992) Vaccine 10:691-698.

[0158] 39—Costantino et al. (1999) Vaccine 17:1251-1263.

[0159] 40—Watson (2000) Pediatr Infect Dis J 19:331-332.

[0160] 41—Rubin (2000) Pediatr Clin North Am 47:269-285, v.

[0161] 42—Jedrzejas (2001) Microbiol Mol Biol Rev 65:187-207.

[0162] 43—International patent application WO93/18150.

[0163] 44—International patent application WO99/53310.

[0164] 45—International patent application WO98/04702.

[0165] 46—Bell (2000) Pediatr Infect Dis J 19:1187-1188.

[0166] 47—Iwarson (1995) APMIS 103:321-326.

[0167] 48—Gerlich et al. (1990) Vaccine 8 Suppl:S63-68 & 79-80.

[0168] 49—Hsu et al. (1999) Clin Liver Dis 3:901-915.

[0169] 50—Gustafsson et al (1996) N. Engl. J. Med. 334:349-355.

[0170] 51—Rappuoli et al. (1991) TIBTECH 9:232-238.

[0171] 52—Vaccines (1988) eds. Plotkin & Mortimer. ISBN 0-7216-1946-0.

[0172] 53—International patent application WO02/02606.

[0173] 54—Kalman et al. (1999) Nature Genetics 21:385-389.

[0174] 55—Read et al. (2000) Nucleic Acids Res 28:1397-406.

[0175] 56—Shirai et al. (2000) J. Infect. Dis. 181(Suppl 3):S524-S527.

[0176] 57—International patent application WO99/27105.

[0177] 58—International patent application WO00/27994.

[0178] 59—International patent application WO00/37494.

[0179] 60—International patent application WO99/28475.

[0180] 61—Ross et al. (2001) Vaccine 19:4135-4142.

[0181] 62—Sutter et al. (2000) Pediatr Clin North Am 47:287-308.

[0182] 63—Zimmerman & Spann (1999) Am Fam Physician 59:113-118, 125-126.

[0183] 64—Dreesen (1997) Vaccine 15 Suppl:S2-6.

[0184] 65—MMWR Morb Mortal Wkly Rep 1998 Jan. 16; 47(1):12, 19.

[0185] 66—McMichael (2000) Vaccine 19 Suppl 1:S101-107.

[0186] 67—Schuchat (1999) Lancet 353(9146):51-6.

[0187] 68—International patent application WO02/34771.

[0188] 69—Dale (1999) Infect Dis Clin North Am 13:227-43, viii.

[0189] 70—Ferretti et al. (2001) PNAS USA 98: 4658-4663.

[0190] 71—Kuroda et al. (2001) Lancet 357(9264):1225-1240; see also pages 1218-1219.

[0191] 72—Ramsay et al. (2001) Lancet 357(9251):195-196.

[0192] 73—Lindberg (1999) Vaccine 17 Suppl 2:S28-36.

[0193] 74—Buttery & Moxon (2000) J R Coll Physicians Lond 34:163-168.

[0194] 75—Ahmad & Chapnick (1999) Infect Dis Clin North Am 13:113-133, vii.

[0195] 76—Goldblatt (1998) J. Med Microbiol. 47:563-567.

[0196] 77—European patent 0 477 508.

[0197] 78—U.S. Pat. No. 5,306,492.

[0198] 79—International patent application WO98/42721.

[0199] 80—Conjugate Vaccines (eds. Cruse et al.) ISBN 3805549326, particularly vol. 10:48-114.

[0200] 81—Hermanson (1996) Bioconjugate Techniques ISBN: 0123423368 or 012342335X.

[0201] 82—European patent application 0372501.

[0202] 83—European patent application 0378881.

[0203] 84—European patent application 0427347.

[0204] 85—International patent application WO93/17712.

[0205] 86—International patent application WO98/58668.

[0206] 87—European patent application 0471177.

[0207] 88—International patent application WO00/56360.

[0208] 89—International patent application WO00/61761.

[0209] 90—Robinson & Torres (1997) Seminars in Immunology 9:271-283.

[0210] 91—Donnelly et al. (1997) Annu Rev Immunol 15:617-648.

[0211] 92—Scott-Taylor & Dalgleish (2000) Expert Opin Investig Drugs 9:471-480.

[0212] 93—Apostolopoulos & Plebanski (2000) Curr Opin Mol Ther 2:441-447.

[0213] 94—Ilan (1999) Curr Opin Mol Ther 1:116-120.

[0214] 95—Dubensky et al. (2000) Mol Med 6:723-732.

[0215] 96—Robinson & Pertmer (2000) Adv Virus Res 55:1-74.

[0216] 97—Donnelly et al. (2000) Am J Respir Crit Care Med 162(4 Pt 2):S190-193.

[0217] 98—Davis (1999) Mt. Sinai J. Med. 66:84-90.

The application's sequence listing, which the Patent Office published only in electronic form, follows.

SEQUENCE LISTING (5131 sequences)

SEQ ID NO: 1 - protein, 168 aa, Neisseria
  VARIANT (1)...(168): Xaa = Any Amino Acid
MKQTVXMLAAALIALGLNRPVWXDDVSDFRENLXAAAQGNAAAQYNLGAMYXQRTRVRRDDAEAVRWYRQPAEQGLAQAQYNLGWMYANGRXVRQDDTEAVRWYRQAAAQGVVQAQYNLGVIYAEGRGVRQDDVEAVRWFRQAAAQGVAQAQNNLGVMYAERXRVRQD

SEQ ID NO: 2 - protein, 198 aa, Neisseria
MKQTVKWLAAALIALGLNRAVWADDVSDFRENLQAAAQGNAAAQYNLGAMYYKGRGVRRDDAEAVRWYRQAAEQGLAQAQYNLGWMYANGRGVRQDDTEAVRWYRQAAAQGVVQAQYNLGVIYAEGRGVRQDDVEAVRWFRQAAAQGVAQAQNNLGVMYAERRGVRQDRALAQEWFGKACQNGDQDGCDNDQRLKAGY

SEQ ID NO: 3 - protein, 90 aa, Neisseria
MKQTVKWLAAALIALGLNQAVWADDVSDFRENLQAAAQGNAAAQNNLGVMYAERRGVRQDRALAQEWLGKACQNGYQDSCDNDQRLKAGY

SEQ ID NO: 4 - protein, 126 aa, Neisseria
MKQTVKWLAAALIALGLNQAVWAGDVSDFRENLQAAEQGNAAAQFNLGVMYENGQGVRQDYVQAVQWYRKASEQGDAQAQYNLGLMYYDGRGVRQDLALAQQWLGKACQNGDQNSCDNDQRLKAGY

SEQ ID NO: 5 - protein, 118 aa, Neisseria
FGDIGGLKVNAPVKSAGVLVGRVGAIGLDPKSYQARVRLDLDGKYQFSSDVSAQILTSGLLGEQYIGLQQGGDTENLAAGDTISVTSSAMVLENLIGKFMTSFAEKNADGGNAEKAAE

SEQ ID NO: 6 - protein, 286 aa, Neisseria
  VARIANT (1)...(286): Xaa = Any Amino Acid
ILIYLIRKNLGSPVFFFQERPGKDGKPFKMVKFRSMRDGLYSDGIPLPDGERLTPFGKKLRAASXDELPELWNILKGEMSLVGPRPLLMQYLPLYDNFQNRRHEMKPGITGWAQVNGRNALSWDEKFACDVWYIDHFSLCLDIKILLLTVKKVLIKEGISAQGEXTMPPFTGKRKLAVVGAGGHGKVVADLAAALGRYREIVFLDDRAQGSVNGFSVIGTTLLLENSLSPEQYDVAVAVGNNRIRRQIAEKAAALGFALPVLVHPDATVSPSATVGQGSVVMAKAV

SEQ ID NO: 7 - protein, 413 aa, Neisseria
MSKFFKRLFDIVASASGLIFLSPVFLILIYLIRKNLGSPVFFFQERPGKDGKPFKMVKFRSMRDALDSDGIPLPDGERLTPFGKKLRAASLDELPELWNILKGEMSLVGPRPLLMQYLPLYDNFQNRRHEMKPGITGWAQVNGRNALSWDEKFACDVWYIDHFSLCLDIKILLLTVKKVLIKEGISAQGEATMPPFTGKRKLAVVGAGGHGKVVADLAAALGRYREIVFLDDRAQGSVNGFSVIGTTLLLENSLSPEQYDVAVAVGNNRIRRQIAEKAAALGFALPVLVHPDATVSPSATVGQGSVVMAKAVVQAGSVLKDGVIVNTAATVDHDCLLNAFVHISPGAHLSGNTHIGEESWIGTGACSRQQIRIGSRATIGAGAVVVRDVSDGMTVAGNPAKPLPRKNPETSTA

SEQ ID NO: 8 - protein, 413 aa, Neisseria
MSKFFKRLFDIVASASGLIFLSPVFLILIYLIRKNLGSPVFFFQERPGKDGKPFKMVKFRSMHDALDSDGILLPDGERLTPFGKKLRAASLDELPELWNVLKGDMSLVGPRPLLMQYLPLYDNFQNRRHEMKPGITGWAQVNGRNALSWDERFACDIWYIDHFSLCLDIKILLLTVKKVLIKEGISAQGEATMPPFTGKRKLAVVGAGGHGKVVAELAAALGTYGEIVFLDDRVQGSVNGFPVIGTTLLLENSLSPEQFDIAVAVGNNRIRRQIAEKAAALGFALPVLIHPDSTVSPSATVGQGGVVMAKAVVQADSVLKDGVIVNTAATVDHDCLLDAFVHISPGAHLSGNTRIGEESWIGTGACSRQQIRIGSRATIGAGAVVVRDVSDGMTVAGNPAKPLAGKNTETLRS

SEQ ID NO: 9 - protein, 413 aa, Neisseria
MSKAVKRLFDIIASASGLIVLSPVFLVLIYLIRKNLGSPVFFIRERPGKDGKPFKMVKFRSMRDALDSDGIPLPDSERLTDFGKKLRATSLDELPELWNVLKGEMSLVGPRPLLMQYLPLYNKFQNRRHEMKPGITGWAQVNGRNALSWDEKFSCDVWYTDNFSFWLDMKILFLTVKKVLIKEGISAQGEATMPPFAGNRKLAVIGAGGHGKVVAELAAALGTYGEIVFLDDRTQGSVNGFPVIGTTLLLENSLSPEQFDITVAVGNNRIRRQITENAAALGFKLPVLIHPDATVSPSAIIGQGSVVMAKAVVQAGSVLKDGVIVNTAATVDHDCLLDAFVHISPGAHLSGNTRIGEESRIGTGACSRQQTTVGSGVTAGAGAVIVCDIPDGMTVAGNPAKPLTGKNPKTGTA

SEQ ID NO: 10 - protein, 135 aa, Neisseria
  VARIANT (1)...(135): Xaa = Any Amino Acid
NHMAIVIDEYGGTSGLVTFEDIIEQIVGEIEDEFDEDDSADNIHAVSSDTWRIHAATEIEDINTFFGTEYSIEEADTIXRPGHSRVGTSARARRKSPYRRFAVHRRTRRQPPPAYADGDPREVSXXXXXRRFCTV

SEQ ID NO: 11 - protein, 299 aa, Neisseria
MDGAQPKTNFFERLIARLAREPDSAEDVLNLLRQAHEQEVFDADTLLRLEKVLDFSDLEVRDAMITRSRMNVLKENDSIERITAYVIDTAHSRFPVIGEDKDEVLGILHAKDLLKYMFNPEQFHLKSILRPAVFVPEGKSLTALLKEFREQRNHMAIVIDEYGGTSGLVTFEDIIEQIVGEIEDEFDEDDSADNIHAVSSERWRIHAATEIEDINTFFGTEYSSEEADTIRPGHSRVGTSARARRKSPYRRFAVHRRTRRQPPPAYADGDPREVSTAVSAQFRMTVRAFSVSIRPIRQT

SEQ ID NO: 12 - protein, 300 aa, Neisseria
  VARIANT (1)...(300): Xaa = Any Amino Acid
MDGAQPKTNFXXRLIARLAREPDSAEDVLTLLRQAHEQEVFDADTLLRLEKVLDFSDLEVRDAMITRSRMNVLKENDSIERITAYVIDTAHSRFPVIGEDKDEVLGILHAKDLLKYMFNPEQFHLKSILRPAVFVPEGKSLTALLKEFREQRNHMAIVIDEYGGTSGLVTFEDIIEQIVGDIEDEFDEDESADNIHAVSAERWRIHAATEIEDINAFFGTEYSSEEADTIGGXGHSGIGTPARARRKSXYRRXAXHXRXRXQPPPAYADGDPREVSSAVSVQFRMTVRAFSVSIRPIRXT

SEQ ID NO: 13 - protein, 287 aa, Neisseria
MDGAQPKTNFFERLIARLAREPDSAEDVLNLLRQAHEQEVFDADTLTRLEKVLDFAELEVRDAMITRSRMNVLKENDSIERITAYVIDTAHSRFPVIGEDKDEVLGILHAKDLLKYMFNPEQFHLKSVLRPAVFVPEGKSLTALLKEFREQRNHMAIVIDEYGGTSGLVTFEDIIEQIVGDIEDEFDEDESADDIHSVSAERWRIHAATEIEDINAFFGTEYGSEEADTIRRLGHSGIGTPARARRKSPYRRFAVHRRPRRQPPPAHADGDPREVSRACPHRRFCTV

SEQ ID NO: 14 - protein, 304 aa, Neisseria
MDGAQPKTNFFERLIARLAREPDSAEDVLNLLRQAHEQEVFDADTLTRLEKVLDFAELEVRDAMITRSRMNVLKENDSIERITAYVIDTAHSRFPVIGEDKDEVLGILHAKDLLKYMFNPEQFHLKSVLRPAVFVPEGKSLTALLKEFREQRNHMAIVIDEYGGTSGLVTFEDIIEQIVGDIEDEFDEDESADDIHSVSAERWRIHAATEIEDINAFFGTEYGSEEADTIRRLGHSGIGTPARARRKSPYRRFAVHRRPRRQPPPAHADGDPREVSRACPTAVSAQFRMTVRSFSVSIRPIRQT

SEQ ID NO: 15 - protein, 187 aa, Neisseria
  VARIANT (1)...(187): Xaa = Any Amino Acid
MRGGRPDSVTVQIIEGSRFSHMRKVIDATPDIGHDTKGWSNEKLMAEVAPDAFSGNPEGQFFPDSYEIDAGGSDLQIYQTAYKAMQRRLNEAWESRQDGLPYKNPYEMLIMAXLVEKETGHEAXXDHVASVFVNRLKIGMRLQTXXSVIYGMGAAYKGKIRKADLRRDTPYNTYTRGGLPPTPIALP

SEQ ID NO: 16 - protein, 331 aa, Neisseria
MLRKLLKWSAVFLTVSAAVFAALLFVPKDNGRAYRIKIAKNQGISSVGRKLAEDRIVFSRHVLTAAAYVLGVHNRLHTGTYRLPSEVSAWDILQKMRGGRPDSVTVQIIEGSRFSHMRKVIDATPDIGHDTKGWSNEKLMAEVAPDAFSGNPEGQFFPDSYEIDAGGSDLQIYQTAYKAMQRRLNEAWESRQDGLPYKNPYEMLIMASLVEKETGHEADRDHVASVFVNRLKIGMRLQTDPSVIYGMGAAYKGKIRKADLRRDTPYNTYTRGGLPPTPIALPGKAALDAAAHPSGEKYLYFVSKMDGTGLSQFSHDLTEHNAAVRKYILKK

SEQ ID NO: 17 - protein, 331 aa, Neisseria
MLRKLLKWSAVFLTVSAAVFAALLFVPKDNGRAYRIKIAKNQGISSVGRKLAEDRIVFSRHVLTAAAYVLGVHNRLHTGTYRLPSEVSAWDILQKMRGGRPDSVTVQIIEGSRFSHMRKVIDATPDIEHDTKGWSNEKLMAEVAPDAFSGNPEGQFFPDSYEIDAGGSDLRIYQIAYKAMQRRLNEAWESRQDGLPYKNPYEMLIMASLIEKETGHEADRDHVASVFVNRLKIGMRLQTDPSVIYGMGAAYKGKIRKADLRRDTPYNTYTRGGLPPTPIALPGKAALDAAAHPSGEKYLYFVSKMDGTGLSQFSHDLTEHNAAVRKYILKK

SEQ ID NO: 18 - protein, 236 aa, Neisseria
MRGGRPDSVTVQIIEGSRFSHMRKVIDATPDIGHDTKGWSNEKLMAEVAPDAFSGNPEGQFFPDSYEIDAGGSDLQIYQTAYKAMQRRLNEAWAGRQDGLPYKNPYEMLIMASLIEKETGHEADRDHVASVFVNRLKIGMRLQTDPSVIYGMGAAYKGKIRKADLRRDTPYNTYTGGGLPPTRIALPGKAAMDAAAHPSGEKYLYFVSKMDGTGLSQFSHDLTEHNAAVRKYILKK

SEQ ID NO: 19 - protein, 298 aa, Neisseria
YRIKIAKNQGISSVGRKLAEDRIVFSRHVLTAAAYVLGVHNRLHTGTYRLPSEVSAWDILQKMRGGRPDSVTVQIIEGSRFSHMRKVIDATPDIGHDTKGWSNEKLMAEVAPDAFSGNPEGQFFPDSYEIDAGGSDLQIYQTAYKAMQRRLNEAWAGRQDGLPYKNPYEMLIMASLIEKETGHEADRDHVASVFVNRLKIGMRLQTDPSVIYGMGAAYKGKIRKADLRRDTPYNTYTGGGLPPTRIALPGKAAMDAAAHPSGEKYLYFVSKMDGTGLSQFSHDLTEHNAAVRKYILKK

SEQ ID NO: 20 - protein, 166 aa, Neisseria
RFKMLTVLTATLIAGQVSAAGGGAGDMKQPKEVGKVFRKQQRYSEEEIKNERARLAAVGERVNQIFTLLGGETALQKGQAGTALATYMLMLERTKSPEVAERALEMAVSLNAFEQAEMIYQKWRQIEPIPGKAQKRAGWLRNVLRERGNQHLDGREEVLAQADEGQ

SEQ ID NO: 21 - protein, 614 aa, Neisseria
MLPNRFKMLTVLTATLIAGQVSAAGGGAGDMKQPKEVGKVFRKQQRYSEEEIKNERARLAAVGERVNQIFTLLGGETALQKGQAGTALATYMLMLERTKSPEVAERALEMAVSLNAFEQAEMIYQKWRQIEPIPGKAQKRAGWLRNVLRERGNQHLDGLEEVLAQADEGQNRRVFLLLAQAAVQQDGLAQKASKAVRRAALKYEHLPEAAVADVVFSVQGREKEKAIGALQRLAKLDTEILPPTLMTLRLTARKYPEILDGFFEQTDTQNLSAVWQEMEIMNLVSLHRLDDAYARLNVLLERNPNADLYIQAAILAANRKEGASVIDGYAEKAYGRGTEEQRSRAALTAAMMYADRRDYAKVRQWLKKVSAPEYLFDKGVLAAAAAVELDGGRAALRQIGRVRKLPEQQGRYFTADNLSKIQMLALSKLPDKREALRGLDKIIEKPPAGSNTELQAEALVQRSVVYDRLGKRKKMISDLERAFRLAPDNAQIMNNLGYSLLTDSKRLDEGFALLQTAYQINPDDTAVNDSIGWAYYLKGDAESALPYLRYSFENDPEPEVAAHLGEVLWALGERDQAVDVWTQAAHLTGDKKIWRETLKRHGIALPQPSRKPRK

SEQ ID NO: 22 - protein, 612 aa, Neisseria
  VARIANT (1)...(612): Xaa = Any Amino Acid
MLPARFTILSVLAAALLAGQAYAAGAADAKPPKEVGKVFRKQQRYSEEEIKNERARLAAVGERVNQIFTLLGXETALQKGQAGTALATYMLMLERTKSPEVAERALEMAVSLNAFEQAEMIYQKWRQIEPIPGKAQKRAGWLRNVLRERGNQHLDGLEEXLAQADEXQNRRVFLLLAQAAVQQDGLAQKASKAVRRAALRYEHLPEAAVADVVFSVQXREKEKAIGALQRLAKLDTEILPPTLMTLRLTARKYPEILDGFFEQTDTQNLSAVWQEMEIMNLVSLHRLDDAYARLNVLLERNPNADLYIQAAILAANRKEXASVIDGYAEKAYGRGTGEQRGRAAMTAAMIYADRRDYTKVRQWLKKVSAPEYLFDKGVLAAAAAVELDXGRAALRQIGRVRKLPEQQGRYFTADNLSKIQMFALSKLPDKREALRGLDKIIEKPPAGSNTELQAEALVQRSVVYDRLGKRKKMISDLERAFRLAPDNAQIMNNLGYSLLSDSKRLDEGFALLQTAYQINPDDTAVNDSIGWAYYLKXDAESALPYLRYSFENDPEPEVAAHLGEVLWALGERDQAVDVWTQAAHLTGDKKIWRETLKRHGIALPQPSRKPRK

SEQ ID NO: 23 - protein, 300 aa, Neisseria
MIMLPARFTILSVLAAALLAGQAYAAGAADVELPKEVGKVLRKHRRYSEEEIKNERARLAAVGERVNRVFTLLGGETALQKGQAGTALATYMLMLERTKSPEVAERALEMAVSLNAFEQAEMIYQKWRQIEPIPGEAQKPAGWLRNVLKEGGNPHLDRLEEVPAQSDYVHQPMIFLLLVQAAVQHGGVAQKPSKAVRPAAYNYEVLPETAGADAVFCVQGPQYEKAIQSFPPCGRNPQTENIAPPFNELFRPTARPISPKLLQRFFRTEPNLAKPFRPPGPEMETYQTGFPRPLTRNNPT

SEQ ID NO: 24 - protein, 612 aa, Neisseria
MLPARFTILSVLAAALLAGQAYAAGAADVELPKEVGKVLRKHRRYSEEEIKNERARLAAVGERVNRVFTLLGGETALQKGQAGTALATYMLMLERTKSPEVAERALEMAVSLNAFEQAEMIYQKWRQIEPIPGEAQKPAGWLRNVLKEGGNQHLDGLKEVLAQSDDVQKRRIFLLLVQAAVQQGGVAQKASKAVRRAALKYEHLPEAAVADAVFGVQGREKEKAIEALQRLAKLDTEILPPTLMTLRLTARKYPEILDGFFEQTDTQNLSAVWQEMEIMNLVSLRKPDDAYARLNVLLEHNPNANLYIQAAILAANRKEGASVIDGYAEKAYGRGTGEQRGRAAMTAAMIYADRRDYAKVRQWLKKVSAPEYLFDKGVLAAAAAAELDGGRAALRQIGRVRKLPEQQGRYFTADNLSKIQMLALSKLPDKREALIGLNNIIAKLSAAGSTEPLAEALAQRSIIYEQFGKRGKMIADLETALKLTPDNAQIMNNLGYSLLSDSKRLDEGFALLQTAYQINPDDTAVNDSIGWAYYLKGDAESALPYLRYSFENDPEPEVAAHLGEVLWALGERDQAVDVWTQAAHLRGDKKIWRETLKRYGIALPEPSRKPRK

SEQ ID NO: 25 - protein, 240 aa, Neisseria
  VARIANT (1)...(240): Xaa = Any Amino Acid
NLYAGPQTTSVIANIADNLQLAKDYGKVHWFASPLFWLLNQLHNIIGNWGWAIIVLTIIVKAVLYPLTNASYRSMAKMRAAAPKLQAIKEKYGDDRMAQQQAMMQLYTDEKINPLGGCLPMLLQIPVFIGLYWALFASVELRQAPWLGWITDLSRADPYYILPIIMAATMFAQTYLNPPPTDPMQAKMMKIMPLVFSXXFFFFPAGXVLYWVVNNLLTIAQQWHINRSIEKQRAQGEVVS

SEQ ID NO: 26 - protein, 545 aa, Neisseria
MDFKRLTAFFAIALVIMIGWEKMFPTPKPVPAPQQAAQQQAVTASAEAALAPATPITVTTDTVQAVIDEKSGDLRRLTLLKYKATGDENKPFILFGDGKEYTYVAQSELLDAQGNNILKGIGFSAPKKQYSLEGDKVEVRLSAPETRGLKIDKVYTFTKGSYLVNVRFDIANGSGQTANLSADYRIVRDHSEPEGQGYFTHSYVGPVVYTPEGNFQKVSFSDLDDDAKSGKSEAEYIRKTPTGWLGMIEHHFMSTWILQPKGRQSVCAAGECNIDIKRRNDKLYSTSVSVPLAAIQNGAKAEASINLYAGPQTTSVIANIADNLQLAKDYGKVHWFASPLFWLLNQLHNIIGNWGWAIIVLTIIVKAVLYPLTNASYRSMAKMRAAAPKLQAIKEKYGDDRMAQQQAMMQLYTDEKINPLGGCLPMLLQIPVFIGLYWALFASVELRQAPWLGWITDLSRADPYYILPIIMAATMFAQTYLNPPPTDPMQAKMMKIMPLVFSVMFFFFPAGLVLYWVVNNLLTIAQQWHINRSIEKQRAQGEVVS

SEQ ID NO: 27 - protein, 545 aa, Neisseria
  VARIANT (1)...(545): Xaa = Any Amino Acid
XDFKRLTXFFAIALVIMIGXXXMFPTPKPVPAPQQTAQQQAVXASAEAALAPXXPITVTTDTVQAVIDEKSGDLRRLTLLKYKATGDXNKPFILFGDGKXYTYXAXSELLDAQGNNILKGIGFSAPKKQYSLEGDKVEVRLSAPETRGLKIDKVYTFTKGSYLVNVRFDIANGSGQTANLSADYRIVRDHSEPEGQGYFTHSYVGPVVYTPEGNFQKVSFSDLDDDAXSGKSEAEYIRKTXTGWLGMIEHHFMSTWILQPKGGQSVCAAGDCXXDIKRRNDKLYSTSVSVPLAAIQNGAKSXASINLYAGPQTTSVIANIADNLQLXKDYGKVHWFASPLFWLLNQLHNIIGNWGWAIIVLTIIVKAVLYPLTNASYRSMAKMRAAAPKLQAIKEKYGDDRMAQQQAMMQLYTDEKINPLGGCLPMLLQIPVFIGLYWALFASVELRQAPWLGWITDLSRADPYYILPIIMAATMFAQTYLNPPPTDPMQAKMMKIMPLVXSXXFFXFPAGLVLYWVINNLLTIAQQWHINRSIEKQRAQGEVVS

SEQ ID NO: 28 - protein, 243 aa, Neisseria
MAVNLYAGPQTTSVIANIADNLQLAKDYGKVHWFASPLFWLLNQLHNIIGNWGWAIVVLTIIVKAVLYPLTNASYRSMAKMRAAAPELQTIKEKYGDDRMAQQQAMMQLFEDEEINPLGGCLPMLLQIPVFIGLYWALFASVELRQAPWLGWITDLSRADPYYILPIIMAATMFAQTYLNPPPTDPMQAKMMKIMPLVFSVMFFFFPAGLVLYWVVNNLLTIAQQWHINRSIEKQRAQGEVVS

SEQ ID NO: 29 - protein, 546 aa, Neisseria
MDFKRLTAFFAIALVIMIGWEKMFPTPKPVPAPQQAAQKQAATASAEAALAPATPITVTTDTVQAVIDEKSGDLRRLTLLKYKATGDENKPFVLFGDGKEYTYVAQSELLDAQGNNILKGIGFSAPKKQYTLNGDTVEVRLSAPETNGLKIDKVYTFTKDSYLVNVRFDIANGSGQTANLSADYRIVRDHSEPEGQGYFTHSYVGPVVYTPEGNFQKVSFSDLDDDAKSGKSEAEYIRKTPTGWLGMIEHHFMSTWILQPKGGQNVCAQGDCRIDIKRRNDKLYSASVSVPLTAIPTRGPKPKMAVNLYAGPQTTSVIANIADNLQLAKDYGKVHWFASPLFWLLNQLHNIIGNWGWAIVVLTIIVKAVLYPLTNASYRSMAKMRAAAPKLQTIKEKYGDDRMAQQQAMMQLYKDEKINPLGGCLPMLLQIPVFIGLYWALFASVELRQAPWLGWITDLSRADPYYILPIIMAATMFAQTYLNPPPTDPMQAKMMKIMPLVFSVMFFFFPAGLVLYWVVNNLLTIAQQWHINRSIEKQRAQGEVVS

SEQ ID NO: 30 - protein, 126 aa, Neisseria
  VARIANT (1)...(126): Xaa = Any Amino Acid
AVLIIELLTGTVYLLVVSAALAGSGIAYGLTGSTPAAVLTXALLSALGIXFVHAKTAVRKVETDSYQDLDAGQYVEILRHTGGNRYEVXYRGTXWQAQNTGQEELEPGTRALIVRKEGNLLIITHP

SEQ ID NO: 31 - protein, 126 aa, Neisseria
  VARIANT (1)...(126): Xaa = Any Amino Acid
AVLIIELLTGTVYLLVVSAALAGSGIAYGLTGSTPAAVLTXALLSALGIXFVHAKTAVRKVETDSYQDLDAGQYVEILRHTGGNRYEVFYRGTHWQAQNTGQEELEPGTRALIVRKEGNLLIITHP

SEQ ID NO: 32 - protein, 135 aa, Neisseria
MTVWFVAAVAVLIIELLTGTVYLLVVSAALAGSGIAYGLTGSTPAAVLTAALLSALGIWFVHAKTAVGKVETDSYQDLDAGQYAEILRHAGGNRYEVFYRGTHWQAQNTGQEELEPGTRALIVRKEGNLLIIAKP

SEQ ID NO: 33 - protein, 135 aa, Neisseria
MTVWFVAAVAVLIIELLTGTVYLLVVSAALAGSGIAYGLTGSTPAAVLTAALLSALGIWFVHAKTAVGKVETDSYQDLDTGKYAEILRYTGGNRYEVFYRGTHWQAQNTGQEVFEPGTRALIVRKEGNLLIIANP

SEQ ID NO: 34 - protein, 136 aa, Neisseria
  VARIANT (1)...(136): Xaa = Any Amino Acid
MXDFGLGELVFVGIIALIVLGPERXPEAARXAGRLIGRLQRFVGSVKQEFDTQIELEELRKAKQEFEAAAAQVRDSLKETGTDMEGNLHDISDGLKPWEKLPEQRTPADFGVDENGNPXSRCGKHPIRRHFRRYAV

SEQ ID NO: 35 - protein, 228 aa, Neisseria
MFDFGLGELVFVGIIALIVLGPERLPEAARTAGRLIGRLQRFVGSVKQEFDTQIELEELRKAKQEFEAAAAQVRDSLKETGTDMEGNLHDISDGLKPWEKLPEQRTPADFGVDENGNPLPDAANTLSDGISDVMPSERSYASAETLGDSGQTGSTAEPAETDQDRAWREYLTASAAAPVVQTVEVSYIDTAVETPVPHTTSLRKQAISRKRDFRPKHRAKPKLRVRKS

SEQ ID NO: 36 - protein, 228 aa, Neisseria
MFDFGLGELVFVGIIALIVLGPERLPEAARTAGRLIGRLQRFVGSVKQEFDTQIELEELRKAKQEFEAAAAQVRDSLKETGTDMEGNLHDISDGLKPWEKLPEQRTPADFGVDENGNPFPDAANTLLDGISDVMPSERSYASAETLGDSGQTGSTAEPAETDQDRAWREYLTASAAAPVVQTVEVSYIDTAVETPVPHTTSLRKQAISRKRDLRPKSRAKPKLRVRKS

SEQ ID NO: 37 - protein, 136 aa, Neisseria
MFDFGLGELIFVGIIALIVLGPERLPEAARTAGRLIGRLQRFVGSVKQELDTQIELEELRKVKQAFEAAAAQVRDSLKETDTDMQNSLHDISDGLKPWEKLPEQRTPADFGVDEKGNSLSRYGKHRIRRHFRRYAV

SEQ ID NO: 38 - protein, 229 aa, Neisseria
MFDFGLGELIFVGIIALIVLGPERLPEAARTAGRLIGRLQRFVGSVKQELDTQIELEELRKVKQAFEAAAAQVRDSLKETDTDMQNSLHDISDGLKPWEKLPEQRTPADFGVDENGNPLPDTANTVSDGISDVMPSERSDTSAETLGDDRQTGSTAEPAETDKDRAWREYLTASAAAPVVQRAVEVSYIDTAVETPVPHTTSLRKQAINRKRDFCPKHRAKPKLRVRKS

SEQ ID NO: 39 - protein, 213 aa, Neisseria
  VARIANT (1)...(213): Xaa = Any Amino Acid
MQARLLIPILFSVFILSACGTLTGIPSHGGXKRFAVEQELVAASARAAVKDMDLQALHGRKVALYIATMGDQGSGSLTGGRYSIDAXXXGEYINSPAVRTDYTYPRYETTAETTSGGLTGLTTSLSTLNAPALSRTQSDGSGSKSSLGLNIGGMGDYRNETLTTNPRDTAFLSHLVQTVFFLRGIDVVSPANADTDVFINIDVFGTIRNRTEM

SEQ ID NO: 40 - protein, 320 aa, Neisseria
MQARLLIPILFSVFILSACGTLTGIPSHGGGKRFAVEQELVAASARAAVKDMDLQALHGRKVALYIATMGDQGSGSLTGGRYSIDALIRGEYINSPAVRTDYTYPRYETTAETTSGGLTGLTTSLSTLNAPALSRTQSDGSGSKSSLGLNIGGMGDYRNETLTTNPRDTAFLSHLVQTVFFLRGIDVVSPANADTDVFINIDVFGTIRNRTEMHLYNAETLKAQTKLEYFAVDRTNKKLLIKPKTNAFEAAYKENYALWMGPYKVSKGIKPTEGLMVDFSDIRPYGNHTGNSAPSVEADNSHEGYGYSDEVVRQHRQGQP

SEQ ID NO: 41 - protein, 320 aa, Neisseria
MQARLLIPILFSVFILSACGTLTGIPSHGGGKRFAVEQELVAASARAAVKDMDLQALHGRKVALYIATMGDQGSGSLTGGRYSIDALIRGEYINSPAVRTDYTYPRYETTAETTSGGLTGLTTSLSTLNAPALSRTQSDGSGSKSSLGLNIGGMGDYRNETLTTNPRDTAFLSHLVQTVFFLRGIDVVSPANADTDVFINIDVFGTIRNRTEMHLYNAETLKAQTKLEYFAVDRTNKKLLIKPKTNAFEAAYKENYALWMGPYKVSKGIKPTEGLMVDFSDIQPYGNHMGNSAPSVEADNSHEGYGYSDEAVRRHRQGQP

SEQ ID NO: 42 - protein, 320 aa, Neisseria
MRARLLIPILFSVFILSACGTLTGIPSHGGGKRFAVEQELVAASARAAVKDMDLQALHGRKVALYIATMGDQGSGSLTGGRYSIDALIRGEYINSPAVRTDYTYPRYETTAETTSGGLTGLTTSLSTLNAPALSRTQSDGSGSRSSLGLNIGGMGDYRNETLTTNPRDTAFLSHLVQTVFFLRGIDVVSPANADTDVFINIDVFGTIRNRTEMHLYNAETLKAQTKLEYFAVDRTNKKLLIKPKTNAFEAAYKENYALWMGPYKVSKGIKPTEGLMVDFSDIQPYGNHTGNSAPSVEADNSHEGYGYSDEAVRQHRQGQP

SEQ ID NO: 43 - protein, 196 aa, Neisseria
  VARIANT (1)...(196): Xaa = Any Amino Acid
GQHKKQAVNGKTVFTMMPGMIFGVFTGAFSAKYIPAFGLQIFFILFLTAVAFKTLHTDPQTASRPLPGLPXLTAVSTLFGTMSSWVGIGGGSLSVPFLIHCGFPAHKAIGTSSGLAWPIALSGAISYLLNGLNIAGLPEGSLGFLYLPAVAVLSAATIAFAPLGVKTAHKLSSAKLKKSFGIMLLLIAGKMLYNLL

SEQ ID NO: 44 - protein, 268 aa, Neisseria
  VARIANT (1)...(268): Xaa = Any Amino Acid
MWHWDIILILLAVGSAAGFIAGLFGVGGGTLIVPVVLWVLDLQGLAQHPYAQHLAVGTSFAVMVFTAFSSMLGQHKKQAVDWKTVFTMMPGMIFGVFTGALSAKYIPAFGLQIFFILFLTAVAFKTLHTDPQTASRPLPGLPGLTAVSTLFGTMSSWVGIGGGSLSVPFLIHCGFPAHKAIGTSSGLAWPIALSGAISYLLNGLNIAGLPEGSLGFLYLPAVAVLSAATIAFAPLGVKTAHKLSSAKLKKXFGIMLLLIAGKMLYNLL

SEQ ID NO: 45 - protein, 268 aa, Neisseria
MWHWDIILILLAVGSAAGFIAGLFGVGGGTLIVPVVLWVLDLQGLAQHPYAQHLAVGTSFAVMVFTAFSSMLGQHKKQAVDWKTVFTMMPGMVFGVFAGALSAKYIPAFGLQIFFILFLTAVAFKTLHTDPQTASRPLPGLPGLTAVSTLFGTMSSWVGIGGGSLSVPFLIHCGFPAHKAIGTSSGLAWPIALSGAISYLLNGLNIAGLPEGSLGFLYLPAVAVLSAATIAFAPLGVKTAHKLSSAKLKKSFGIMLLLIAGKMLYNLL

SEQ ID NO: 46 - protein, 268 aa, Neisseria
MWHWDIILILLAVGSAAGFIAGLFGVGGGTLIVPVVLWVLDLQGLAQHPYAQHLAVGTSFAVMVFTAFSSMLGQHKKQAVDWKTIFAMMPGMIFGVFAGALSAKYIPAFGLQIFFILFLTAVAFKTLHTGRQTASRPLPGLPGLTAVSTLFGAMSSWVGIGGGSLSVPFLIHCGFPAHKAIGTSSGLAWPIALSGAISYLVNGLNIAGLPEGSLGFLYLPAVAVLSAATIAFAPLGVKTAHKLSSAKLKESFGIMLLLIAGKMLYNLL

SEQ ID NO: 47 - protein, 268 aa, Neisseria; identical to SEQ ID NO: 46

SEQ ID NO: 48 - protein, 116 aa, Neisseria
GNGWQADPEHPLLGLFAVSNVSMTLAFVGICALVHYCFSGTVQVFVFAALLKLYALKPVYWFVLQFVLMAVAYVHRCGIDRQPPSTFGGSQLRLGGLTAALMQVSVLVLLLSEIGR

SEQ ID NO: 49 - protein, 201 aa, Neisseria
MILLHLDFLSALLYAAVFLFLIFRAGMLQWFWASIMLWLGISVLGAKLMPGIWGMTRAAPLFIPHFYLTLGSIFFFIGHWNRKTDGNGWQADPEHPLLGLFAVSNVSMTLAFVGICALVHYCFSGTVQVFVFAALLKLYALKPVYWFVLQFVLMAVAYVHRCGIDRQPPSTFGGSQLRLGGLTAALMQVSVLVLLLSEIGR

SEQ ID NO: 50 - protein, 201 aa, Neisseria
  VARIANT (1)...(201): Xaa = Any Amino Acid
MILLHLDFLSALLYAAVFLFLIFRAGMLQWFWASIMLWLGISVLGAKLMPGIWGMTRAAPLFIPHFYLTLGSIFFFIGHWNRKTDGNGWQADPEHPLLGLFAVSNVSMTLAFVGICALVHYCFSXTVQVFVFAALLKLYALKPVYWFVLQFVLMAVAYVHRCGIDRQPPSTFGGSQLRLGGLTAALMQXSVLVLLLSEIGR

SEQ ID NO: 51 - protein, 201 aa, Neisseria
MILLHLDFLSALLYAAVFLFLIFRAGMLQWFWASIALWLGISVLGVKLMPGMWGMTRAAPLFIPHFYLTLGSIFFFIGYWNRKTDGNGWQADPEHPLLGLFAVSNVSMTLAFVGICALVHYCFSGTVQVFVFAALLKLYALKPVYWFVLQFVLMAVAYVHRCGIDRQPPSTFGGSQLRLGVLAAMLMQVAVTAMLLAEIGR

SEQ ID NO: 52 - protein, 103 aa, Neisseria
  VARIANT (1)...(103): Xaa = Any Amino Acid
MKTPLLKPLLITSLPVFASVFTAASIVWQLGEPKLAMPFVLGIIAGGLVDLDNXXTGRLKNIITTVALFTLSSLTAQSTLGTGLPFILAMTLMTXXFTILGAX

SEQ ID NO: 53 - protein, 716 aa, Neisseria
MKTPLLKPLLITSLPVFASVFTAASIVWQLGEPKLAMPFVLGIIAGGLVDLDNRLTGRLKNIITTVALFTLSSLTAQSTLGTGLPFILAMTLMTFGFTILGAVGLKYRTFAFGALAVATYTTLTYTPETYWLTNPFMILCGTVLYSTAILLFQIVLPHRPVQESVANAYDALGGYLEAKADFFDPDEAAWIGNRHIDLAMSNTGVITAFNQCRSALFYRLRGKHRHPRTAKMLRYYFAAQDIHERISSAHVDYQEMSEKFKNTDIIFRIHRLLEMQGQACRNTAQALRASKDYVYSKRLGRAIEGCRQSLRLLSDSNDSPDIRHLRRLLDNLGSVDQQFRQLQHNGLQAENDRMGDTRIAALETSSLKNTWQAIRPQLNLESGVFRHAVRLSLVVAAACTIVEALNLNLGYWILLTALFVCQPNYTATKSRVRQRIAGTVLGVIVGSLVPYFTPSVETKLWIVIASTTLFFMTRTYKYSFSTFFITIQALTSLSLAGLDVYAAMPVRIIDTIIGASLAWAAVSYLWPDWKYLTLERTAALAVCSNGAYLEKITERLKSGETGDDVEYRATRRRAHEHTAALSSTLSDMSSEPAKFADSLQPGFTLLKTGYALTGYISALGAYRSEMHEECSPDFTAQFHLAAEHTAHIFQHLPETEPDDFQTALDTLRGELDTLRTHSSGTQSHILLQQLQLIARQLEPYYRAYRQIPHRQPQNAA

SEQ ID NO: 54 - protein, 716 aa, Neisseria
MKTPPLKPLLITSLPVFASVFTAASIVWQLGEPKLAMPFVLGIIAGGLVDLDNRLTGRLKNIIATVALFTLSSLVAQSTLGTGLPFILAMTLMTFGFTIMGAVGLKYRTFAFGALAVATYTTLTYTPETYWLTNPFMILCGTVLYSTAIILFQIILPHRPVQENVANAYEALGSYLEAKADFFDPDEAEWIGNRHIDLAMSNTGVITAFNQCRSALFYRLRGKHRHPRTAKMLRYYFAAQDIHERISSAHVDYQEMSEKFKNTDIIFRIHRLLEMQGQACRNTAQALRASKDYVYSKRLGRAIEGCRQSLRLLSDSNDNPDIRHLRRLLDNLGSVDQQFRQLQHNGLQAENDRMGDTRIAALETGSLKNTWQAIRPQLNLESGVFRHAVRLSLVVAAACTIVEALNLNLGYWILLTALFVCQPNYTATKSRVRQRIAGTVLGVIVGSLVPYFTPSVETKLWIVIASTTLFFMTRTYKYSFSTFFITIQALTSLSLAGLDVYAAMPVRIIDTIIGASLAWAAVSYLWPDWKYLTLERTAALAVCSNGAYLEKITERLKSGETGDDVEYRATRRRAHEHTAALSSTLSDMSSEPAKFADSLQPGFTLLKTGYALTGYISALGAYRSEMHEECSPDFTAQFHLAAEHTAHIFQHLPETEPDDFQTALDTLRGELDTLRTHSSGTQSHILLQQLQLIARQLEPYYRAYRQIPHRQPQNAA

SEQ ID NO: 55 - protein, 370 aa, Neisseria
MKTPLLKPLLITSLPVFASVFTAASIVWQLGEPKLAMPFVLGIIAGGLVDLDNRLTGRLKNIIATVALFTLSSLTAQSTLGTGLPFILAMTLMTFGFTILGAVGLKYRTFAFGALAVATYTTLTYTPETYWLTNPFMILCGTVLYSTAIILFQIILPHRPVQESVANAYEALGGYLEAKADFFDPDEAAWIGNRHIDLAMSNTGVITAFNQCRSALFYRLRGKHRHPRTAKMLRYYFAAQDIHERISSAHVDYQEMSEKFKNTDIIFRIRRLLEMQGQACRNTAQAIRSGKDYVYSKRLGRAIEGCRQSLRLLSDGNDSPDIRHLSRLLDNLGSVDQQFRQLRHSDSPAENDRMGDTRIAALETGSFKNT

SEQ ID NO: 56 - protein, 716 aa, Neisseria
MKTPLLKPLLITSLPVFASVFTAASIVWQLGEPKLAMPFVLGIIAGGLVDLDNRLTGRLKNIIATVALFTLSSLTAQSTLGTGLPFILAMTLMTFGFTILGAVGLKYRTFAFGALAVATYTTLTYTPETYWLTNPFMILCGTVLYSTAIILFQIILPHRPVQESVANAYEALGGYLEAKADFFDPDEAAWIGNRHIDLAMSNTGVITAFNQCRSALFYRLRGKHRHPRTAKMLRYYFAAQDIHERISSAHVDYQEMSEKFKNTDIIFRIRRLLEMQGQACRNTAQAIRSGKDYVYSKRLGRAIEGCRQSLRLLSDGNDSPDIRHLSRLLDNLGSVDQQFRQLRHSDSPAENDRMGDTRIAALETGSFKNTWQAIRPQLNLESCVFRHAVRLSLVVAAACTIVEALNLNLGYWILLTALFVCQPNYTATKSRVYQRIAGTVLGVIVGSLVPYFTPSVETKLWIVIAGTTLFFMTRTYKYSFSTFFITIQALTSLSLAGLDVYAAMPVRIIDTIIGASLAWAAVSYLWPDWKYLTLERTAALAVCSSGTYLQKIAERLKTGETGDDIEYRITRRRAHEHTAALSSTLSDMSSEPAKFADSLQPGFTLLKTGYALTGYISALGAYRSEMHEECSPDFTAQFHLAAEHTAHIFQHLPDMGPDDFQTALDTLRGELGTLRTRSSGTQSHILLQQLQLIARQLEPYYRAYRQIPHRQPQNAA

SEQ ID NO: 57 - protein, 454 aa, Neisseria
  VARIANT (1)...(454): Xaa = Any Amino Acid
MNMLGALAKVGSLTMVSRVLGFVRDTVIARAFGAGMATDAFFVAFKLPNLLRRVFAEGAFAQAFVPILAEYKETRSKEAXEAFIRHVAGMLSFVLVIVTALGILAAPWVIYVSAPSFAQDADKFQLSIDLLRITFPYILLISLSSFVGSVLNSYHKFGIPAFTPXFLNVSFIVFALFFVPYFDPPVTAXAWAVFVGGILQLXFQLPWLAKLGFLKLPKLSFKDAAVNRVMKQMAPAILGVSVAQVSLVINTIFASYLQSGSVSWMYYADRMMELPSGVLGAALGTILLPTLSKHSANQDTEQFSALLDWGLRLCMLLTLPAAVGLAVLSFPLVATLFMYRXFTLFDAQMTQHALIAYSFGLIGLIMIKVLAPGFYARQNIXXPVKIAIFTLICXQLMNLXFXGPLXXIGLSLAIGLGACINAGLLFYLLRRHGIYQPXQGLGSVLXQKCCSRSP

SEQ ID NO: 58 - protein, 512 aa, Neisseria
MNMLGALAKVGSLTMVSRVLGFVRDTVIARAFGAGMATDAFFVAFKLPNLLRRVFAEGAFAQAFVPILAEYKETRSKEAAEAFIRHVAGMLSFVLVIVTALGILAAPWVIYVSAPGFAQDADKFQLSIDLLRITFPYILLISLSSFVGSVLNSYHKFGIPAFTPTFLNVSFIVFALFFVPYFDPPVTALAWAVFVGGILQLGFQLPWLAKLGFLKLPKLSFKDAAVNRVMKQMAPAILGVSVAQVSLVINTIFASYLQSGSVSWMYYADRMMELPSGVLGAALGTILLPTLSKHSANQDTEQFSALLDWGLRLCMLLTLPAAVGLAVLSFPLVATLFMYREFTLFDAQMTQHALIAYSFGLIGLIMIKVLAPGFYARQNIKTPVKIAIFTLICTQLMNLAFIGPLKHVGLSLAIGLGACINAGLLFYLLRRHGIYQPGKGWAAFLAKMLLSLAVMCGGLWAAQAYLPFEWAHAGGMRKAGQLCILIAVGGGLYFASLAALGFRPRHFKRVEN

SEQ ID NO: 59 - protein, 512 aa, Neisseria
  VARIANT (1)...(512): Xaa = Any Amino Acid
MNMLGALVKVGSLTMVSRVLGFVRDTVIARAFGAGMATDAFFVAFKLPNLLRRVFAEGAFAQAFVPILAEYKETRSKEATEAFIRHVAGMLSFVLVIVTALGILAAPWVIYVSAPGFAKDADKFQLSIDLLRITFPYILLISLSSFVGSVLNSYHKFSIPAFTPTFLNVSFIVFALFFVPYFDPPVTALAWAVFVGGILQLGFQLPWLAKLGFLKLPKLSFKDAAVNRVMKQMAPAILGVSVAQISLVINTIFASYLQSGSVSWMYYADRMMELPGGVLGAALGTILLPTLSKHSANQDTEQFSALLDWGLRXCMLLTLPAAVGMAVLSFPLVATLFMYREFTLFDAQMTQHALIAYSFGLIGLIMIKVLAPGFYARQNIKTPVKIAIFTLICTQLMNLAFIGPLKHVGLSLAIGLGACINAGLLFYLLRRHGIYQPGKGWAAFLAKMLLSLAVMGGGLYAAQIWLPFDWAHAGGMQKAARLFILIAVGGGLYFASLAALGFRPRHFKRVES

SEQ ID NO: 60 - protein, 454 aa, Neisseria
MNMLGALAKVGSLTMVSRVLGFVRDTVIARAFGAGMATDAFFVAFKLPNLLRRVFAEGAFAQAFVPILAEYKETRSKEATEAFIRHVAGMLSFVLIVVTALGILAAPWVIYVSAPGFTKDADKFQLSISLLRITFPYILLISLSSFVGSILNSYHKFGIPAFTPTFLNISFIVFALFFVPYFDPPVTALAWAVFVGGILQLGFQLPWLAKLGFLKLPKLNFKDAAVNRVMKQMAPAILGVSVAQISLVINTIFASYLQSGSVSWMYYADRMMELPGGVLGAALGTILLPTLSKHSANQDTEQFSALLDWGLRLCMLLTLPAAAGLAVLSFPLVATLFMYREFTLFDAQMTQHALIAYSFGLIGLIMIKVLASGFYARQNIKTPVKIAIFTLICTQLMNLAFIGPLKHAGLSLAIGLGACINAGLLFFLFRKHGIYRPGQGLGQPSWRKCCSRSP

SEQ ID NO: 61 - protein, 512 aa, Neisseria
MNMLGALAKVGSLTMVSRVLGFVRDTVIARAFGAGMATDAFFVAFKLPNLLRRVFAEGAFAQAFVPILAEYKETRSKEATEAFIRHVAGMLSFVLIVVTALGILAAPWVIYVSAPGFTKDADKFQLSISLLRITFPYILLISLSSFVGSILNSYHKFGIPAFTPTFLNISFIVFALFFVPYFDPPVTALAWAVFVGGILQLGFQLPWLAKLGFLKLPKLNFKDAAVNRVMKQMAPAILGVSVAQISLVINTIFASYLQSGSVSWMYYADRMMELRRGVLGAALGTILLPTLSKHSANQDTEQFSALLDWGLRLCMLLTLPAAAGLAVLSFPLVATLFMYREFTLFDAQMTQHALIAYSFGLIGLIMIKVLASGFYARQNIKTPVKIAIFTLICTQLMNLAFIGPLKHAGLSLAIGLGACINAGLLFFLLRKHGIYRPGRGWAAFLAKMLLALAVMCGGLWAAQACLPFEWAHAGGMRKAGQLCILIAVGGGLYFASLAALGFRPRHFKRVES

SEQ ID NO: 62 - protein, 158 aa, Neisseria
  VARIANT (1)...(158): Xaa = Any Amino Acid
MIKIKKGLNLPIAGRPEQAVYDGPAITEVALLGEEYAGMRPSMKVKEGDAVKKGQVLFEDKKNPGVVFTAPASGKIAAIHRGEKRVLQSVVIAVEXNDEIEFERYAPEALANLSGEEVRRNLIQSGLWTALRTRPFSKIPAVDAEPFAIFVNAMDTNP

SEQ ID NO: 63 - protein, 447 aa, Neisseria
MIKIKKGLNLPIAGRPEQAVYDGPAITEVALLGEEYAGMRPSMKVKEGDAVKKGQVLFEDKKNPGVVFTAPASGKIAAIHRGEKRVLQSVVIAVEGNDEIEFERYAPEALANLSGEEVRRNLIQSGLWTALRTRPFSKIPAVDAEPFAIFVNAMDTNPLAADPTVIIKEAAEDFKRGLLVLSRLTERKIHVCKAAGADVPSENAANIETHEFGGPHPAGLSGTHIHFIEPVGANKTVWTINYQDVITIGRLFATGRLNTERVIALGGSQVNKPRLLRTVLGAKVSQITAGELVDTDNRVISGSVLNGAITQGAHDYLGRYHNQISVIEEGRSKELFGWVAPQPDKYSITRTTLGHFLKNKLFKFNTAVNGGDRAMVPIGTYERVMPLDILPTLLLRDLIVGDTDSAQALGCLELDEEDLALCSFVCPGKYEYGPLLRKVLETIEKEG

SEQ ID NO: 64 - protein, 447 aa, Neisseria
  VARIANT (1)...(447): Xaa = Any Amino Acid
MIKIKKGLNLPIAGRPEQVIYDGPVITEVALLGEEYAGMRPXMKVKEGDAVKKGQVLFEDKKXPGVVFTAPVSGKIAAIHRGEKRVLQSVVIAVEGNDEIEFERYAPEALANLSGXEXXXNLIQSGLWTALRXRPFSKIPAVDAEPFAIFVNAMDTNPLAADPVVVIKEAXXDFRRXXLVLSRLTERKIHVCKAAGADVPSENAANIETHEFGGPHPAGLSGTHIHFIEPVGANKTVWTINYQDVIAIGRLFATGRLNTERVIALGGSQVNKPRLLRTVLGAKVSQITAGELVDADNRVISGSVLNGAITQGAHDYLGRYHNQISVIEEGRSKELFGWVAPQPDKYSITRTTLGHFLKNKLFKFTTAVNGGDRAMVPIGTYERVMPLDILPTLLLRDLIVGDTDSAQALGCLELDEEDLALCSFVCPGKYEXGPLLRKVLETXEKEG

SEQ ID NO: 65 - protein, 322 aa, Neisseria
MIKIKKGLNLPIAGRPEQVIYDGPAITEVALLGEEYVGMRPSMKIKEGEAVKKGQVLFEDKKNPGVVFTAPASGKIAAIHRGEKRVLQSVVIAVEGNDEIEFERYVPEALAKLSSEKVRRNLIQSGLWTALRTRPFSKIPAVDAEPFAIFVNAMDTNPLAADPTVIIKEAAEDFKRGLLVLSRLTERKIHVCKAAGADVPSENAANIETHEFGGPHPAGLSGTHIHFIEPVGANKTVWTINYQDVIAIGRLFVTGRLNTERVVALGGLQVNKPRLLRTVLGAKVSQLTAGELVDADNRVISGSVLNGAIAQGAHDYLGRYHN

SEQ ID NO: 66 - protein, 447 aa, Neisseria
MIKIKKGLNLPIAGRPEQVIYDGPAITEVALLGEEYVGMRPSMKIKEGEAVKKGQVLFEDKKNPGVVFTAPASGKIAAIHRGEKRVLQSVVIAVEGNDEIEFERYVPEALAKLSSEKVRRNLIQSGLWTALRTRPFSKIPAVDAEPFAIFVNAMDTNPLAADPTVIIKEAAEDFKRGLLVLSRLTERKIHVCKAAGADVPSENAANIETHEFGGPHPAGLSGTHIHFIEPVGANKTVWTINYQDVIAIGRLFVTGRLNTERVVALGGLQVNKPRLLRTVLGAKVSQLTAGELVDADNRVISGSVLNGAIAQGAHDYLGRYHNQISVIEEGRSKELFGWVAPQPDKYSITRTTLGHFLKNKLFKFTTAVNGGDRAMVPIGTYERVMPLDILPTLLLRDLIVGDTDSAQALGCLELDEEDLALCSFVCPGKYEYGPLLRKVLETIEKEG

SEQ ID NO: 67 - protein, 320 aa, Neisseria
  VARIANT (1)...(320): Xaa = Any Amino Acid
AXXIIHPXXVVGPEANWFFMVASTFVIALIGYFVTEKIVEPQLGPYQSDLSQEEKDIRHSNEITPLEYKGLIWAGVVFVALSALLAWSIVPADGILRHPETGLVSGSPFLKSIVVFIFLLFALPGIVYGRVTRSLRGEQEVVNAXAESMSTLXLXLXXIFFAAQFVAFFNWTNIGQYIAVKGATFLKEVGLGGSVLFIGFILICAFINLMIGSASAQWAVTAPIFVPMLMLAGYAPEVIQAAYRIGDSVTNIITPMMSYFGLIMATVXXYKKDAGVGTLIXMMLPYSAFFLIAWIALFCIWVFVLGLPVGPGAPTFYPAP

SEQ ID NO: 68 - protein, 522 aa, Neisseria
MSQTDTQRDGRFLRTVEWLGNMLPHPVTLFIIFIVLLLIASAVGAYFGLSVPDPRPVGAKGRADDGLIYIVSLLNADGFIKILTHTVKNFTGFAPLGTVLVSLLGVGIAEKSGLISALMRLLLTKSPRKLTTFMVVFTGILSNTASELGYVVLIPLSAIIFHSLGRHPLAGLAAAFAGVSGGYSANLFLGTIDPLLAGITQQAAQIIHPDYVVGPEANWFFMVASTFVIALIGYFVTEKIVEPQLGPYQSDLSQEEKDIRHSNEITPLEYKGLIWAGVVFVALSALLAWSIVPADGILRHPETGLVSGSPFLKSIVVFIFLLFALPGIVYGRVTRSLRGEQEVVNAMAESMSTLGLYLVIIFFAAQFVAFFNWTNIGQYIAVKGATFLKEVGLGGSVLFIGFILICAFINLMIGSASAQWAVTAPIFVPMLMLAGYAPEVIQAAYRIGDSVTNIITPMMSYFGLIMATVIKYKKDAGVGTLISMMLPYSAFFLIAWIALFCIWVFVLGLPVGPGAPTFYPAP

SEQ ID NO: 69 - protein, 522 aa, Neisseria
MSQTDTQRDGRFLRTVEWLGNMLPHPVTLFIIFIVLLLIASAAGAYFGLSVPDPRPVGAKGRADDGLIHVVSLLDADGLIKILTHTVKNFTGFAPLGTVLVSLLGVGIAEKSGLISALMRLLLTKSPRKLTTFMVVFTGILSNTASELGYVVLIPLSAIIFHSLGRHPLAGLAAAFAGVSGGYSANLFLGTIDPLLAGITQQAAQIIHPDYVVGPEANWFFMVASTFVIALIGYFVTEKIVEPQLGPYQSDLSQEEKDIRHSNEITPLEYKGLIWAGVVFVALSALLAWSIVPADGILRHPETGLVSGSPFLKSIVVFIFLLFALPGIVYGRVTRSLRGEQEVVNAMAESMSTLGLYLVIIFFAAQFVAFFNWTNIGQYIAVKGATFLKEVGLGGSVLFIGFILICAFINLMIGSASAQWAVTAPIFVPMLMLAGYAPEVIQAAYRIGDSVTNIITPMMSYFGLIMATVIKYKKDAGVGTLISMMLPYSAFFLIAWIALFCIWVFVLGLPVGPGAPTFYPAP

SEQ ID NO: 70 - protein, 522 aa, Neisseria
MSQTDARRSGRFLRTVEWLGNMLPHPVTLFIIFIVLLLIASAVGAYFGLSVPDPRPVGAKGRADDGLIHVVSLLDADGLIKILTHTVKNFTGFAPLGTVLVSLLGVGIAEKSGLISALMRLLLTKSPRKLTTFMVVFTGILSNTASELGYVVLIPLSAVIFHSLGRHPLAGLAAAFAGVSGGYSANLFLGTIDPLLAGITQQAAQIIHPDYVVGPEANWFFMAASTFVIALIGYFVTEKIVEPQLGPYQSDLSQEEKDIRHSNEITPLEYKGLIWAGVVFVALSALLAWSIVPADGILRHPETGLVAGSPFLKSIVVFIFLLFALPGIVYGRITRSLRGEREVVNAMAESMSTLGLYLVIIFFAAQFVAFFNWTNIGQYIAVKGAVFLKKFRLGGSVLFIGFILICAFINLMIGSASAQWAVTAPIFVPMLMLAGNAPQVIQAAYRIGDSVTNIITPMMSYFGLIMATVIKYKKDAGVGTLISMMLPYSAFFLIAWIALFCIWVFVLGLPVGPGTPTFYPVP

SEQ ID NO: 71 - protein, 167 aa, Neisseria
  VARIANT (1)...(167): Xaa = Any Amino Acid
TAGAAGXXVFVFVTDSQVEVFGNIQTAVETGFFHGISVSSVFGAAAQDSAMASRSASIPVFSATEMRTAAIFPAASRHMPVFCSSDGSRSVLLYTLMHGISPAWISCSTFSTSSICCPLFGAAASTTCSSTSACAVSSSVAEKAEISLCGRXLTNPTVSVRIMLHSG

SEQ ID NO: 72 - protein, 381 aa, Neisseria
MEDLQEIGFDVAAVKVGRQREHHRLHHPQPGNGEADDVLFAFFLVGGFDFLRVIGCGGVAYLPDFQQNVGKADFAVVPDDAAAVRAVIEVDADDAVCTQKLLFDQPDAGGAGDAAEHNRLARAAVGFHKVGLDFGQVVQADLVEDFLGRQLGFLRVGGALFVITAQARVNNALCDCLTTGAAGFAVFVFVTDGQMQVFGNVQPAVETGFFHGISVSSVFGAAAQYSAMASRSASIPVFSATEMRTAAIFPAASRHMPVFCSSDGSRSVLLYTLMHGISPAWISCSTFSTSSICCPLFGAAASTTCSSTSACAVSSSVAEKAEISLCGRSLTNPTVSVRIMLHSGLMYSRRAVVSSVAKSWSFAYMPDLVSRLNRLDLPTLV

SEQ ID NO: 73 - protein, 382 aa, Neisseria
MEDLQEIGFDVAAVKVGRQREHHRLHHTQSGNGKADDVLFAFFLVGGFDFLRVIGCGGVACLPDFQQNVGEADFAVVPDDAAAVRAVIEVDADDAVCAQKLLFDQPDAGGAGNAAEHQHCFVRAIMGFHKVGLDFGQVVQADLVEDFLGRQFGFFRVGGASFVITAQAGIDDALCDCLTADAAGFAVFAFVADGQMQVFGNVQPAVETGFFHGISVSSVFGAAAQYSAMASRSASIPVFSATEMRTAAIFPAASRHMPVFCSSDGSRSVLLYTLMHGISWAWISCSTFSTSSICCPLFRAAASTTCSSTSACTVSSKVAEKAEISLCGRSLTNPTVSVRIMLHAGLMYSRRAVVSRVAKSWSFAYMPDLVSRLNRLDLPTLV

SEQ ID NO: 74 - protein, 181 aa, Neisseria
  VARIANT (1)...(181): Xaa = Any Amino Acid
GHYSDRTWKPRLXGRRLPYLLYGTLIAVIVMILMPNSGSFGFGYASLAALSFGALMIALLDVSSNMAMQPFKMMVGDMVNEEQKXYAYGIQSFLANTGAVVAAILPFVFAYIGLANTAXKGVVPQTVVVAFYVGAALLVITSAFTIFKVKEYXPETYARYHGIDVAANQEKANWIALLKXA

SEQ ID NO: 75 - protein, 451 aa, Neisseria
MSEYTPQTAKQGLPALAKSTIWMLSFGFLGVQTAFTLQSSQMSRIFQTLGADPHNLGWFFILPPLAGMLVQPIVGHYSDRTWKPRLGGRRLPYLLYGTLIAVIVMILMPNSGSFGFGYASLAALSFGALMIALLDVSSNMAMQPFKMMVGDMVNEEQKGYAYGIQSFLANTGAVVAAILPFVFAYIGLANTAEKGVVPQTVVVAFYVGAALLVITSAFTIFKVKEYDPETYARYHGIDVAANQEKANWIELLKTAPKAFWTVTLVQFFCWFAFQYMWTYSAGAIAENVWHTTDASSVGYQEAGNWYGVLAAVQSVAAVICSFVLAKVPNKYHKAGYFGCLALGALGFFSVFFIGNQYALVLSYTLIGIAWAGIITYPLTIVTNALSGKHMGTYLGLFNGSICMPQIVASLLSFVLFPMLGGLQATMFLVGGVVLLLGAFSVFLIKETHGGV

SEQ ID NO: 76 - protein, 451 aa, Neisseria
MSEYTPQTAKQGLPALAKSTIWMLSFGFLGVQTAFTLQSSQMSRIFQTLGADPHSLGWFFILPPLAGMLVQPIVGHYSDRTWKPRLGGRRLPYLLYGTLIAVIVMILMPNSGSFGFGYASLAALSFGALMIALLDVSSNMAMQPFKMMVGDMVNEEQKGYAYGIQSFLANTGAVVAAILPFVFAYIGLANTAEKGVVPQTVVVAFYVGAALLVITSAFTIFKVKEYNPETYARYHGIDVAANQEKANWIELLKTAPKAFWTVTLVQFFCWFAFQYMWTYSAGAIAENVWHTTDASSVGYQEAGNWYGVLAAVQSVAAVICSFVLAKVPNKYHKAGYFGCLALGALGFFSVFFIGNQYALVLSYTLIGIAWAGIITYPLTIVTNALSGKHMGTYLGLFNGSICMPQIVASLLSFVLFPMLGGLQATMFLVGGVVLLLGAFSVFLIKETHGGV

SEQ ID NO: 77 - protein, 339 aa, Neisseria
MIGDRRAGNHFGFSKANTFQIKKKDLLYVGIYASNSKTRFARAGKKHDLDVELRLSRRSDGLYPAKLADEPHFSNARRRPAQFGLVFHPAAAGGDAGSADSGYYSDRTWKPRLGGRRLPYLLYGTLIAVIVMILMPNSGSFGFGYASLAALSFGALMIALLDVSSNMAMQPFKMMVGDMVNEEQKSYAYGIQSFLANTDAVVAAILPFVFAYIGLANTAEKGVVPQTVVVAFYVGAALLIITSAFTISKVKEYDPETYARYHGIDVAANQEKANWFELLKTAPKVFWTVTPVQFFCWFAFRYMWTYSAGAIAENVWHTTDASSVGHQEAGNRYGVLAAV

SEQ ID NO: 78 - protein, 120 aa, Neisseria
  VARIANT (1)...(120): Xaa = Any Amino Acid
MLFRKTTAAVLAHTLMLNGCTLMLWGMNNPVSETITRKHVXKDQIRXFGVVAEDNAQLEKGSLVMMGGKYWFVVNPEDSAXXTGILXAGLDKPFQIVXDTPSYXCHQALPVKLGSXGSQN

SEQ ID NO: 79 - protein, 238 aa, Neisseria
MLFRKTTAAVLAATLMLNGCTLMLWGMNNPVSETITRKHVDKDQIRAFGVVAEDNAQLEKGSLVMMGGKYWFVVNPEDSAKLTGILKAGLDKPFQIVEDTPSYARHQALPVKLESPGSQNFSTEGLCLRYDTDKPADIAKLKQLGFEAVKLDNRTIYTRCVSAKGKYYATPQKLNADYHFEQSVPADIYYTVTEEHTDKSKLFANILYTPPFLILDAAGAVLALPAAALGAVVDAARK

SEQ ID NO: 80 - protein, 237 aa, Neisseria
MLFRKTTAAVLAATLMLNGCTVMMWGMNSPFSETTARKHVDKDQIRAFGVVAEDNAQLEKGSLVMMGGKYWFVVNPEDSAKLTGILKAGLDKQFQMVEPNPRFAYQALPVKLESPASQNFSTEGLCLRYDTDRPADIAKLKQLEFEAVELDNRTIYTRCVSAKGKYYATPQKLNADYHFEQSVPADIYYTVTKKHTDKSKLFENIAYTPTTLILDAVGAVLALPVAALIAATNSSDK

SEQ ID NO: 81 - protein, 237 aa, Neisseria
MLFRKTTAAVLAATLILNGCTMMLRGMNNPVSQTITRKHVDKDQIRAFGVVAEDNAQLEKGSLVMMGGKYWFAVNPEDSAKLTGLLKAGLDKPFQIVEDTPSYARHQALPVKFEAPGSQNFSTGGLCLRYDTGRPDDIAKLKQLEFKAVKLDNRTIYTRCVSAKGKYYATPQKLNADYHFEQSVPADIYYTVTEKHTDKSKLFGNILYTPPLLILDAAAAVLVLPMALIAAANSSDK

SEQ ID NO: 82 - protein, 125 aa, Neisseria
  VARIANT (1)...(125): Xaa = Any Amino Acid
VSPVLPITHERTGFEGVIGYETHFSGHGHEVHSPFDHHDSKSTSDFSGGVDGGFTVYQLHRTWSEIHPEDEYDGPQAAXYPPPGGARDIYSYYVKGTSTKTKTSIVPQAPFSDRWLEENAGAASG

SEQ ID NO: 83 - protein, 483 aa, Neisseria
MNLPIQKFMMLFAAAISLLQIPISHANGLDARLRDDMQAKHYEPGGKYHLFGNARGSVKKRVYAVQTFDATAVSPVLPITHERTGFEGVIGYETHFSGHGHEVHSPFDHHDSKSTSDFSGGVDGGFTVYQLHRTGSEIHPEDGYDGPQGSDYPPPGGARDIYSYYVKGTSTKTKTNIVPQAPFSDRWLKENAGAASGFFSRADEAGKLIWESDPNKNWWANRMDDVRGIVQGAVNPFLMGFQGVGIGAITDSAVSPVTDTAAQQTLQGINDLGKLSPEAQLAAASLLQDSAFAVKDGINSAKQWADAHPNITATAQTALSAAEAAGTVWRGKKVELNPTKWDWVKNTGYKKPAARHMQTLDGEMAGGNKPIKSLPNSAAEKRKQNFEKFNSNWSSASFDSVHKTLTPNAPGILSPDKVKTRYTSLDGKITIIKDNENNYFRIHDNSRKQYLDSNGNAVKTGNLQGKQAKDYLQQQTHIRNLDK

SEQ ID NO: 84 - protein, 482 aa, Neisseria
  VARIANT (1)...(482): Xaa = Any Amino Acid
MNXPIQKFMMLFAAAISXLQIPISHANGLDARLRDDMQAKHYEPGGKYHLFGNARGSVKNRVYAVQTFDATAVGPILPITHERTGFEGIIGYETHFSGHGHEVHSPFDNHDSKSTSDFSGGVDGGFTVYQLHRTGSEIHPEDGYDGPQGSDYPPPGGARDIYXXYVKGTSTKTKSNIVPRAPFSDRWLKENAGAASGFFSRADEAGKLIWESDPNKNWWANRMDDIRGIVQGAVNPFLMGFQGVGIGAITDSAVSPVTDTAAQQTLQGXNHLGXLSPEAQLAAATALQDSAFAVKDGINSARQWADAHPNITATAQTALAVAXAATTVWGGKKVELNPTKWDWVKNTGYXTPAVRTMHTLDGEMAGGNRPPKSITSNSKADASTQPSLQAQLIGEQIXXGHAYNKHVIRQQEFTDLNINSPADFARHIENIVSHPXNMKELPRGRTAYWDXKTGTIVIRDKNSDDGGTAFRPTSGKKYYDDL

SEQ ID NO: 85 - protein, 468 aa, Neisseria
MNLPIQKFMMLFAAAISLLQIPISHANGLDARLRDDMQAKHYEPGGKYHLFGNARGSVKNRVCAVQTFDATAVGPILPITHERTGFEGVIGYETHFSGHGHEVHSPFDNHDSKSTSDFSGGVDGGFTVYQLHRTGSEIHPEDGYDGPQGGGYPPPGGARDIYSYHIKGTSTKTKINTVPQAPFSDRWLKENAGAASGFLSRADEAGKLIWENDPDKNWRANRMDDIRGIVQGAVNPFLTGFQGLGVGAITDSAVSPVTYAAARKTLQGIHNLGNLSPEAQLAAATALQDSAFAVKDSINSARQWADAHPNITATAQTALAVTEAATTVWGGKKVELNPAKWDWVKNTGYKKPAARHMQTVDGEMAGGNKPLESKNTVTTNNFFENTGYTEKVLRQASNGDYHGFPQSVDAFSENGTVIQIVGGDNIVRHKLYIPGSYKGKDGNFEYIREADGKINHRLFVPNQQLPEK

SEQ ID NO: 86 - protein, 498 aa, Neisseria
MNLPIQKFMMLLAAAISMLHIPISHANGLDARLRDDMQAKHYEPGGKYHLFGNARGSVKNRVCAVQTFDATAVGPILPITHERTGFEGVIGYETHFSGHGHEVHSPFDNHDSKSTSDFSGGVDGGFTVYQLHRTGSEIHPADGYDGPQGGGYPEPQGARDIYSYHIKGTSTKTKINTVPQAPFSDRWLKENAGAASGFLSRADEAGKLIWENDPDKNWRANRMDDIRGIVQGAVNPFLTGFQGVGIGAITDSAVSPVTDTAAQQTLQGINDLGNLSPEAQLAAASLLQDSAFAVKDGINSARQWADAHPNITATAQTALAVAEAAGTVWRGKKVELNPTKWDWVKNTGYKKPAARHMQTVDGEMAGGNRPPKSITSEGKANAATYPKLVNQLNEQNLNNIAAQDPRLSLAIHEGKKNFPIGTATYEEADRLGKIWVGEGARQTSGGGWLSRDGTRQYRPPTEKKSQFATTGIQANFETYTIDSNEKRNKIKNGHLNIR

SEQ ID NO: 87 - protein, 42 aa, Neisseria
MKKQITAAVMMLSMIAPAMANGLDNQAFEDQMFHTRADAPMQ

SEQ ID NO: 88 - protein, 181 aa, Neisseria
MKKQITAAVMMLSMIAPAMANGLDNQAFEDQVFHTRADAPMQLAELSQKEMKETEGAFLPLAILGGAAIGMWTQHGFSYATTGRPASVRDVAIAGGLGAIPGGVGAAGKVVSFAKYGREIKIGNNMRIAPFGNRTGHPIGKFPHYHRRVTDNTGKTLPGQGIGRHRPWESKSTDRSWKNRF

SEQ ID NO: 89 - protein, 181 aa, Neisseria
  VARIANT (1)...(181): Xaa = Any Amino Acid
MKKQITAAVMMLSMIAPAMANGLDNQAFEDQVFHTRADAPMQLAELSQKEMKXTXGAFLPLXILGGAAIGMWTQHGFSYATTGRPASVRDVAIAGGLGAIPGXVGAAGKVVSFAKYGREIKIGNNMRIAPFGNRTGHPIGKFPHYHRRVTDNTGKTLPGQGIGRHRPWESKSTDRSWKNRF

SEQ ID NO: 90 - protein, 179 aa, Neisseria
MKKQITAAVMMLSMIAPAMANGLDNQAFEDQVFHTRADAPMQLAELSQKEMKETEGAFLPLAILGGAAIGMWTQHGFSYATTGRPASVRDVAGGLGAIPGDVGAAGKVVSFAKYGREIKIGNNMRIAPFGNRTGHPIGKFPHYHRRVTDNTGKTLPGQGIGRHRPWESKSTDRSWKNRF

SEQ ID NO: 91 - protein, 84 aa, Neisseria
  VARIANT (1)...(84): Xaa = Any Amino Acid
MNKTLYRVIFNRKRGAVXAVAETTKREGKSCADSDSGSAHVKSVPFGTTHAPVCXVTNIFSFSLLGFSLCLAVGTXNIAFADGI

SEQ ID NO: 92 - protein, 83 aa, Neisseria
MNKTLYRVIFNRKRGAVVAVAETTKREGKSCADSDSGSAHVKSVPFGTTHAPVCRSNIFSFSLLGFSLCLAVGTANIAFADGI

SEQ ID NO: 93 - protein, 263 aa, Neisseria
MNKTLYRVIFNRKRGAVVAVAETTKREGKSCADSGSGSVYVKSVSFIPTHSKAFCFSALGFSLCLALGTVNIAFADGIITDKAAPKTQQATILQTGNGIPQVNIQTPTSAGVSVNQYAQFDVGNRGAILNNSRSNTQTQLGGWIQGNPWLTRGEARVVVNQINSSHPSQLNGYIEVGGRRAEVVIANPAGIAVNGGGFINASRATLTTGQPQYQAGDFSGFKIRQGNAVIAGHGLDARDTDFTRILVCQQNHLDQYGRTSRHS

SEQ ID NO: 94 - protein, 81 aa, Neisseria
MNTPPFVCWIFCKVIDNFGDIGVSWRLARVLHRELGWQVHLWTDDVSALRALCPDLPDVPCVHQDIHVRTWHSDAADIDTA

SEQ ID NO: 95 - protein, 382 aa, Neisseria
MNTPPFVCWIFCKVIDNFGDIGVSWRLARVLHRELGWQVHLWTDDVSALRALCPDLPDVPCVHQDIHVRTWHSDAADIDTAPVPDVVIETFACDLPENVLHIIRRHKPLWLNWEYLSAEESNERLHLMPSPQEGVQKYFWFMGFSEKSGGLIRERDYCEAVRFDTEALRERLMLPEKNASEWLLFGYRSDVWAKWLEMWRQAGSPMTLLLAGTQIIDSLKQSGVIPQDALQNDGDVFQTASVRLVKIPFVPQQDFDQLLHLADCAVIRGEDSFVRAQLAGKPFFWHIYPQDENVHLDKLHAFWDKAHGFYTPETVSAHRRLSDDLNGGEALSATQRLECWQTLQQHQNGWRQGAEDWSRYLFGQPSAPEKLAAFVSKHQKIR

SEQ ID NO: 96 - protein, 382 aa, Neisseria
  VARIANT (1)...(382): Xaa = Any Amino Acid
MNTPPFSAGXFCKVIDNFGDIGVSWRLARVLHRELGWQVHLWTDDVSALRALCPDLPDVXCVHQDIHVRTWHSDAADIDTAPVXDVVIETFACDLPENVLHIIRRHKPLWLXWEYLSAEXSNERLHXMPSPQESVXKXFWFMGFSEXSGGLIRERDYCEAVRFDSGALRKRLMLPEKNXPEWLLFGYRSDVWAKWLEMWRQAGSPLTLLLAGAXIIDSLKQNGVIPQDALQNDGDVFQTASVRLVKIPFVPQQDFDKLLHLADCAVIRGEDSFVRAQLAGKPFFWHIYPQDENVHLDKLHAFWDKAHGFYTPETASAHRRLSDDLNGGEALSATQRLECWQILQQHQNGWRQGAEDWSRYLFGQPSASEKLAAFVSKHQKIR

SEQ ID NO: 97 - protein, 345 aa, Neisseria
MVMNTYAFPVCWIFCKVIDNFGDIGVSWRLARVLHRELGWQVHLWTDDVSALRALCPDLPDVPFVHQDIHVRTWHSDAADIDTAPVPDAVIETFACDLPENVLNIIRRHKPLWLNWEYLSAEESNERLHLMPSPQEGVQKYFWFMGFSEKSGGLIRERDYREAVRFDTEALRRRLVLPEKNAPEWLLFGYRGDVWAKWLDMWQQAGSLMTLLLAGAQIIDSLKQSGVIPQNALQNEGGVFQTASVRLVKIPFVPQQDFDKLLHLADCAVIRGEDSFVRTQLAGKPFFWHIYPQDENVHLDKLHAFWDKAYGFYTPETASVHRLLSDDLNGGEALSATQRLECGVL

SEQ ID NO: 98 - protein, 383 aa, Neisseria
MNTYAFPVCWIFCKVIDNFGDIGVSWRLARVLHRELGWQVHLWTDDVSALRALCPDLPDVPFVHQDIHVRTWHSDAADIDTAPVPDAVIETFACDLPENVLNIIRRHKPLWLNWEYLSAEESNERLHLMPSPQEGVQKYFWFMGFSEKSGGLIRERDYREAVRFDTEALRRRLVLPEKNAPEWLLFGYRGDVWAKWLDMWQQAGSLMTLLLAGAQIIDSLKQSGVIPQNALQNEGGVFQTASVRLVKIPFVPQQDFDKLLHLADCAVIRGEDSFVRTQLAGKPFFWHIYPQDENVHLDKLHAFWDKAYGFYTPETASVHRLLSDDLNGGEALSATQRLECWQTLQQHQNGWRQGAEDWSRYLFGQPSASEKLAAFVSKHQKIR

SEQ ID NO: 99 - protein, 143 aa, Neisseria
  VARIANT (1)...(143): Xaa = Any Amino Acid
LFLRVKVGRFFSSPATWFRXKDPVNQAVLRLYXDEWRXTSVRWKIXATSHSLWLCTLLGMLVSVLLLLLVRQYTFNWESTLLSNAASVRAVEMLAWLPSKLGFPVPDARSVIEGRLNGNIADARAWSGLLVXSIACXGILPRL

SEQ ID NO: 100 - protein, 446 aa, Neisseria
MLNPSRKLVELVRILDEGGFIFSGDPVQATEALRRVDGSTEEKIIRRAEMIDRNRMLRETLERVRAGSFWLWVVAATFAFFTGFSVTYLLMDNQGLNFFLVLAGVLGMNTLMLAVWLAMLFLRVKVGRFFSSPATWFRGKDPVNQAVLRLYADEWRQPSVRWKIGATSHSLWLCTLLGMLVSVLLLLLVRQYTFNWESTLLSNAASVRAVEMLAWLPSKLGFPVPDARAVIEGRLNGNIADARAWSGLLVGSIACYGILPRLLAWVVCKILLKTSENGLDLEKPYYQAVIRRWQNKITDADTRRETVSAVSPKIILNDAPKWAVMLETEWQDGEWFEGRLAQEWLDKGVATNREQVAALETELKQKPAQLLIGVRAQTVPDRGVLRQIVRLSEAAQGGAVVQLLAEQGLSDDLSEKLEHWRNALAECGAAWLEPDRAAQEGRLKDQ

SEQ ID NO: 101 - protein, 449 aa, Neisseria
  VARIANT (1)...(449): Xaa = Any Amino Acid
MLNPSRKLVELVRILEEGGFIFSGDPVQATEALRRVDGSTEEKIIRRAKMIDRNRMLRETLERVRAGSFWLWVAAATFAFXTXFSVTYLLMDNQGLNFFLVLAGVXGMNTLMLAVWLAMLFLRVKVGRFFSSPATWFRGKDPVNQAVLRLYADEWRXPSVRWKIGATSHSLWLCTLLGMLVSVLLLLLVRQYTFNWESTLLGDSSSVRLVEMLAWLPAKLGFPVPDARAVIEGRLNGNIADARAWSGLLVGSIACYGILPRLLAWAVCKILXXTSENGLDLEKXXXXXXIRRWQNKITDADTRRETVSAVSPKIVLNDAPKWAVMLETEWQDGEWFEGRLAQEWLDKGVAANREQVAALETELKQKPAQLLIGVRAQTVPDRGVLRQIVRLSEAAQGGAVVXLLAEQGLSDDLSEKLEHWRNALTECGAAWLEPDRAAQEGRLKTNDRT

SEQ ID NO: 102 - protein, 397 aa, Neisseria
MIDRDRMLRDTLERVRAGSFWLWVVVASMMFTAGFSGTYLLMDNQGLNFFLVLAGVLGMNTLMLAVWLATLFLRVKVGRFFSSPATWFRGKGPVNQAVLRLYADQWRQPSVRWKIGATAHSLWLCTLLGMLVSVLLLLLVRQYTFNWESTLLSNAASVRAVEMLAWLPSKLGFPVPDARAVIEGRLNGNIADARAWSGLLVGSIVCYGILPRLLAWVVCKILLKTSENGLDLEKTYYQAVIRRWQNKITDADTRRETVSAVSPKIVLNDAPKWALMLETEWQDGQWFEGRLAQEWLDKGVAANREQVAALETELKQKPAQLLIGVRAQTVPDRGVLRQIVRLSEAAQGGAVVQLLAEQGLSDDLSEKLEHWRNALTECGAAWLEPDRVAQEGRLKDQ

SEQ ID NO: 103 - protein, 446 aa, Neisseria
MLNPSRKLVELVRILNKGGFIFSGDPVQATEALRRVDGSTEEKIFRRAEMIDRDRMLRDTLERVRAGSFWLWVVVASMMFTAGFSGTYLLMDNQGLNFFLVLAGVLGMNTLMLAVWLATLFLRVKVGRFFSSPATWFRGKGPVNQAVLRLYADQWRQPSVRWKIGATAHSLWLCTLLGMLVSVLLLLLVRQYTFNWESTLLSNAASVRAVEMLAWLPSKLGFPVPDARAVIEGRLNGNIADARAWSGLLVGSIVCYGILPRLLAWVVCKILLKTSENGLDLEKTYYQAVIRRWQNKITDADTRRETVSAVSPKIVLNDAPKWALMLETEWQDGQWFEGRLAQEWLDKGVAANREQVAALETELKQKPAQLLIGVRAQTVPDRGVLRQIVRLSEAAQGGAVVQLLAEQGLSDDLSEKLEHWRNALTECGAAWLEPDRVAQEGRLKDQ

SEQ ID NO: 104 - protein, 150 aa, Neisseria
  VARIANT (1)...(150): Xaa = Any Amino Acid
QKSLSRISLWGLGGVFFGVSGLVWFSLGVSXECACFSGVSFRGSGRGTFVGSTGVSLSVFSACVXGVVRLPVGLSCVGRLXXLTRFFLGAAGDVILLPLSSVPSGCAGSDEAAWWCSGWAASCPTTPFGSQNSVSRGLSVCCGSARVLSS

SEQ ID NO: 105 - protein, 453 aa, Neisseria
  VARIANT (1)...(453): Xaa = Any Amino Acid
MMMPFIMLPWIAGVPAVPGQNRLSRISLWGLGGVFFGVSGLVWFSLGVSLGCACFSGVSFRGSGRGTFVGSTGVSLSVFSACVPASSGCLSVXAVSAGCGLTRFFLGAAGDGSPLPLSSVPSGCAGSDEAAWWCSGWAASCPTTPFGSQNSVSRGLSVCCGSAXRVLSPFGLNVLTMPIANAPMAAIQMSNTARIRSLGVSLKGLFGFFAILIVLLGCRAMPSEGGSDGIAESALDVVLVEGDDFLYADGGADFLGNLRLFFGGEDAHNVGYVAVGNDFDARLCGGADAQQRGADFGCVPSVAGDVAGSARQGGDGNIVVHAFGGLFGTCNLTDELFFAFGGDLSEQQQVAVVADDGDLGRVAFGLVVLAQIGTGGGFDTQRHNVVVGLRAGGSAVDGGFRADGGASDYCADAAAKGKAENGGNQGADGVRFGFHRVLPFLGVSDGIALRHAV

SEQ ID NO: 106 - protein, 459 aa, Neisseria
  VARIANT (1)...(459): Xaa = Any Amino Acid
MMXPXIMLPWIAGVPAVPGQKRLSRXSLWGLGGXFFGVSGLVWFSLGVSXSLGVSXGCACFSGVSFRGSGRGTFVGSTGVSLSVFSACAPASSGCLSVXAVSAGCGLTRXFXGAAGDGSPLPLSSVPSGCAGADEEAXXCSGWAASCPTTPFGSQNSVSRGLSVCCGSVWRVLSPFGXNVLTMPIANAPMAVIQMSNTARIRSLGVSLKGLFXFFAILIVLLGCRAMPSEGGSDGIAESALDVVXVEGDDFLYADGGADFLGNLRLFFGGEDAHNVGYVAVGNDFDARLCGGADAQQRGADFGCVPSVAGDVAGSARQGGDGNVXVHAFGGLFGTCNLTDELFLAFGGDLSEQQQVAVVADNGDLGRVXFGLVVLAQIGAGGGFDTQRHYVVVGXRAGGSAVDGGFRADRRAADDCADAAAEGKAEDGGSQGADGVRFGFHRVLPFLGVSDGIALRHAV

SEQ ID NO: 107 - protein, 459 aa, Neisseria
MMMPFIMLPWIAGVPAVPGQKRLSRISLWGLAGVFFGVSGLVWFSLGVSFSLGVSLGCACFSGVSFRGSGWGAFVGSTGVSLSVFSACVPVPVNESAARAASEGRGLTRFFLGAAGDGSPLPLSSVPSGCAGSDEAAWWCSGWAASCPTAPFGSQNSVSRGLSVCCGSVWRVLSPFGLNVLTMPTANAPMAVIQMSNTARIRSLGVSLKGLFGFFAILIVLLGCRAMPSEGGSDGIAESALDVVLVEGNDFLYADGGADFLGNLRLFFGGEDAHNVGYIAVGNDFDARLCSGADAQQRGADFGRVPSVAGDVARSARQGGDGNVVVYAFGGLFGTCNLTDELFFAFGGDLSEQQQVAVVADDGDLGRVAFGLVVLAQVGTGGGFDTQRHNVVIGLRAGGSAVDDGFCADGGPADDCAEAAAEGKAEDGGNQGADGVWFGFHRGLPFLGVSDGIALRHAV

SEQ ID NO: 108 - protein, 93 aa, Neisseria
  VARIANT (1)...(93): Xaa = Any Amino Acid
MKTFFKTLSAAALALILAACGXQKDSAPAASASAAADNGAAKKEIVFGTTVGDFGDMVKEQIQAELEKKGYTVKLVEFTDYVRPNLALAEGEL

SEQ ID NO: 109 - protein, 287 aa, Neisseria
MKTFFKTLSAAALALILAACGGQKDSAPAASASAAADNGAAKKEIVFGTTVGDFGDMVKEQIQAELEKKGYTVKLVEFTDYVRPNLALAEGELDINVFQHKPYLDDFKKEHNLDITEVFQVPTAPLGLYPGKLKSLEEVKDGSTVSAPNDPSNFARVLVMLDELGWIKLKDGINPLTASKADIAENLKNIKIVELEAAQLPRSRADVDFAVVNGNYAISSGMKLTEALFQEPSFAYVNWSAVKTADKDSQWLKDVTEAYNSDAFKAYAHKRFEGYKSPAAWNEGAAK

SEQ ID NO: 110 - protein, 287 aa, Neisseria
  VARIANT (1)...(287): Xaa = Any Amino Acid
MKTFFKTLSAAALALILAACGGQKDSAPAASASAAADNGAAXKEIVFGTTVGDFGDMVKEXIQPELEKKGYTVKLVEXTDYVRXNLALAEGELDINVXQHXXYLDDXKKXHNLDITXVXQVPTAPLGLYPGKLKSLXXVKXGSTVSAPNDPXXFXRVLVMLDELGXIKLKDXIXXXXXXXXXXXXXXXXXXXXXXXXXXXXXXXAXXXXXXXXXXXXXXSGMKLTEALFQEPSFAYVNWSAVKTADKDSQWLKDVTEAYNSDAFKAYAHKRFEGYKSPAAWNEGAAK

SEQ ID NO: 111 - protein, 287 aa, Neisseria
MKTFFKTLSAAALALILAACGGQKDSAPAASASAAADNGAAKKEIVFGTTVGDFGDMVKEQIQPELEKKGYTVKLVEFTDYVRPNLALAEGELDINVFQHKPYLDDFKKEHNLDITEVFQVPTAPLGLYPGKLKSLEEVKDGSTVSAPNDPSNFARVLVMLDELGWIKLKDGINPLTASKADIAENLKNIKIVELEAAQLPRSRADVDFAVVNGNYAISSGMKLTEALFQEPSFAYVNWSAVKTADKDSQWLKDVTEAYNSDAFKAYAHKRFEGYKSPAAWNEGAAK

SEQ ID NO: 112 - protein, 288 aa, Neisseria
MKTFFKTLSTASLALILAACGGQKDSAPAASAAAPSADNGAAKKEIVFGTTVGDFGDMVKEQIQAELEKKGYTVKLVEFTDYVRPNLALAEGELDINVFQHKPYLDDFKKEHNLDITEAFQVPTAPLGLYPGKLKSLEEVKDGSTVSAPNDPSNFARALVMLNELGWIKLKDGINPLTASKADIAENLKNIKIVELEAAQLPRSRADVDFAVVNGNYAISSGMKLTEALFQEPSFAYVNWSAVKTADKDSQWLKDVTEAYNSDAFKAYAHKRFEGYKYPAAWNEGAAK

SEQ ID NO: 113 - protein, 288 aa, Neisseria
MKTFFKTLSAAALALILAACGGQKDSAPAASAAAPSADNGAAKKEIVFGTTVGDFGDMVKEQIQAELEKKGYTVKLVEFTDYVRPNLALAEGELDINVFQHKPYLDDFKKEHNLDITEAFQVPTAPLGLYPGKLKSLEEVKDGSTVSAPNDPSNFARALVMLNELGWIKLKDGINPLTASKADIAENLKNIKIVELEAAQLPRSRADVDFAVVNGNYAISSGMKLTEALFQEPSFAYVNWSAVKTADKDSQWLKDVTEAYNSDAFKAYAHKRFEGYKYPAAWNEGAAK

SEQ ID NO: 114 - protein, 318 aa, Neisseria
  VARIANT (1)...(318): Xaa = Any Amino Acid
XXXXXXPRRPRHAPVSRGDLLQGGGTYARHGHRAGRGFGRFMAEPALFPRQPPLLPHRRHGKRTGRLGGGRQKRLRPXAGRADDVYAHRRQRQRMARQRTHARHERPHRRGHRHRRRQTAAAEIHTDVAFHACRQPGRLQQNDCRNQQRQAHDPRTPRGEHGENAPNQRTHGQKPQPSRRHIGRKLHQPRHDGSHAARPPXNRQHHRAAPDHRRQAAISQTQRQRNPAAXPPLHTAPNXXXXXXXXXXXQTRPPHPHRHRHQPRTGSPRRTPPLPMAGLPLAQHRYASGNFRPRHPAATHPPQMAGCPRTPTPAPKPA

SEQ ID NO: 115 - protein, 318 aa, Neisseria
MDRDDRLRRPRHAPVPRRDLLQRGGTYARYGHRAGRGFGRFMAEPALFPRQPPLLPDHRHGKRTGRLGGGRQKRLRPYVGGADDVHAHRRQRQRMARQRPDARDERPHRRRHRHCRRQTAAAEIHTDVAFHACRQPGRLQQNDCRNQQRQAYDARTFGAEYGQNAPNQRTHGQKPQPPRRHIGRKPHQPLHDGSHAARPPQNRQHHRAAPDHRRQAAISQTQRQRNPAARPPLHTAPNRPATNRRPHQRQTRPPHPHRHRHQPRTGSPRRTPPLPMAGFPLAQHQYASGNFRPRHPPATHPPQMAGCPRTPTPAPKPA

SEQ ID NO: 116 - protein, 189 aa, Neisseria
  VARIANT (1)...(189): Xaa = Any Amino Acid
EISLRSDXRPVSVXKRRDSERFLLLDGGNSRLKWAWVENGTFATVGSAPYRDLSPLGAEWAEKADGNVRIVGCAVCGEFKKAQVQEQLARKIEWLPSSAQAXGIRNHYRHPEEHGSDRWFNALGSRRFSRNACVVVSCGTAVTVDALTDDGHYLGXGTIMPGFHLMKESLAVRTANLNRHAGKRYPFPT

SEQ ID NO: 117 - protein, 592 aa, Neisseria
MTVLKLSHWRVLAELADGLPQHVSQLARMADMKPQQLNGFWQQMPAHIRGLLRQHDGYWRLVRPLAVFDAEGLRELGERSGFQTALKHECASSNDEILELARIAPDKAHKTICVTHLQSKGRGRQGRKWSHRLGECLMFSFGWVFDRPQYELGSLSPVAAVACRRALSRLGLDVQIKWPNDLVVGRDKLGGILIETVRTGGKTVAVVGIGINFVLPKEVENAASVQSLFQTASRRGNADAAVLLETLLVELDAVLLQYARDGFAPFVAEYQAANRDHGKAVLLLRDGETVFEGTVKGVDGQGVLHLETAEGKQTVVSGEISLRSDDRPVSVPKRRDSERFLLLDGGNSRLKWAWVENGTFATVGSAPYRDLSPLGAEWAEKADGNVRIVGCAVCGEFKKAQVQEQLARKIEWLPSSAQALGIRNHYRHPEEHGSDRWFNALGSRRFSRNACVVVSCGTAVTVDALTDDGHYLGGTIMPGFHLMKESLAVRTANLNRHAGKRYPFPTTTGNAVASGMMDAVCGSVMMMHGRLKEKTGAGKPVDVIITGGGAAKVAEALPPAFLAENTVRVADNLVIYGLLNMIAAEGREYEHI

SEQ ID NO: 118 - protein, 592 aa, Neisseria
MTVLKPSHWRVLAELADGLPQHVSQLARMADMKPQQLNGFWQQMPAHIRGLLRQHDGYWRLVRPLAVFDAEGLRELGERSGFQTALKHECASSNDEILELARIAPDKAHKTICVTHLQSKGRGRQGRKWSHRLGECLMFSFGWVFDRPQYELGSLSPVAAVACRRALSRLGLKTQIKWPNDLVVGRDKLGGILIETVRTGGKTVAVVGIGINFVLPKEVENAASVQSLFQTASRRGNADAAVLLETLLAELDAVLLQYARDGFAPFVAEYQAANRDHGKAVLLLRDGETVFEGTVKGVDGQGVLHLETAEGKQTVVSGEISLRSDDRPVSVPKRRDSERFLLLDGGNSRLKWAWVENGTFATVGSAPYRDLSPLGAEWAEKVDGNVRIVGCAVCGEFKKAQVQEQLARKIEWLPSSAQALGIRNHYRHPEEHGSDRWFNALGSRRFSRNACVVVSCGTAVTVDALTDDGHYLGGTIMPGFHLMKESLAVRTANLNRHAGKRYPFPTTTGNAVASGMMDAVCGSVMMMHGRLKEKTGAGKPVDVIITGGGAAKVAEALPPAFLAENTVRVADNLVIHGLLNLIAAEGGESEHT

SEQ ID NO: 119 - protein, 455 aa, Neisseria
MFSFGWAFDRPQYELGSLSPVAALACRRALGCLGLETQIKWPNDLVVGRDKLGGILIETVRAGGKTVAVVGIGINFVLPKEVENAASVQSLFQTASRRGNADAAVLLETLLAELGAVLEQYAEEGFAPFLNEYETANRDHGKAVLLLRDGETVCEGTVKGVDGRGVLHLETAEGEQTVVSGEISLRPDNRSVSVPKRPDSERFLLLEGGNSRLKWAWVENGTFATVGSAPYRDLSPLGAEWAEKADGNVRIVGCAVCGESKKAQVKEQLARKIEWLPSSAQALGIRNHYRHPEEHGSDRWFNALGSRRFSRNACVVVSCGTAVTVDALTDDGHYLGGTIMPGFHLMKESLAVRTANLNRPAGKRYPFPTTTGNAVASGMMDAVCGSIMMMHGRLKEKNGAGKPVDVIITGGGAAKVAEALPPAFLAENTVRVADNLVIHGLLNLIAAEGGESEHA

SEQ ID NO: 120 - protein, 592 aa, Neisseria
MTVLKPSHWRVLAELADGLPQHVSQLAREADMKPQQLNGFWQQMPAHIRGLLRQHDGYWRLVRPLAVFDAEGLRDLGERSGFQTALKHECASSNDEILELARIAPDKAHKTICVTHLQSKGRGRQGRKWSHRLGECLMFSFGWAFDRPQYELGSLSPVAALACRRALGCLGLETQIKWPNDLVVGRDKLGGILIETVRAGGKTVAVVGIGINFVLPKEVENAASVQSLFQTASRRGNADAAVLLETLLAELGAVLEQYAEEGFAPFLNEYETANRDHGKAVLLLRDGETVCEGTVKGVDGRGVLHLETAEGEQTVVSGEISLRPDNRSVSVPKRPDSERFLLLEGGNSRLKWAWVENGTFATVGSAPYRDLSPLGAEWAEKADGNVRIVGCAVCGESKKAQVKEQLARKIEWLPSSAQALGIRNHYRHPEEHGSDRWFNALGSRRFSRNACVVVSCGTAVTVDALTDDGHYLGGTIMPGFHLMKESLAVRTANLNRPAGKRYPFPTTTGNAVASGMMDAVCGSIMMMHGRLKEKNGAGKPVDVIITGGGAAKVAEALPPAFLAENTVRVADNLVIHGLLNLIAAEGGESEHA

SEQ ID NO: 121 - protein, 216 aa, Neisseria
MFYQILALIIWSSSFIAAKYVYGGIDPALMVGVRLLIAALPALPACRRHVGKIPREEWKPLLIVSFVNYVLTLLLQFVGLKYTSAASASVIVGLEPLLMVFVGHFFFNDKARAYHWICGAAAFAGVALLMAGGAEEGGEVGWFGCLLVLLAGAGFCAAMRPTQRLIARIGAPAFTSVSIAAASLMCLPFSLALAQSYTVDWSVGMVLSLLYLGLGC

SEQ ID NO: 122 - protein, 284 aa, Neisseria
MFYQILALIIWSSSFIAAKYVYGGIDPALMVGVRLLIAALPALPACRRHVGKIPREEWKPLLIVSFVNYVLTLLLQFVGLKYTSAASASVIVGLEPLLMVFVGHFFFNDKARAYHWICGAAAFAGVALLMAGGAEEGGEVGWFGCLLVLLAGAGFCAAMRPTQRLIARIGAPAFTSVSIAAASLMCLPFSLALAQSYTVDWSVGMVLSLLYLGLGCGWYAYWLWNKGMSRVPANVSGLLISLEPVVGVLLAVLILGEHLSPVSALGVFVVIAATLVAGRLSHQK

SEQ ID NO: 123 - protein, 284 aa, Neisseria
MFYQILALIIWSSSFIAAKYVYGGIDPALMVGVRLLIAALPALPACRRHVGKIPREEWKPLLIVSFVNYVLTLLLQFVGLKYTSAASASVIVGLEPLLMVFVGHFFFNDKARAYHWICGAAAFAGVALLMAGGAEEGGEVGWFGCLLVLLAGAGFCAAMRPTQRLIARIGAPAFTSVSIAAASLMCLPFSLALAQSYTVDWSVGMVLSLLYLGVGCSWYAYWLWNKGMSRVPANVSGLLISLEPVVGVLLAVLILGEHLSPVSVLGVFVVIAATLVAGRLSHQK

SEQ ID NO: 124 - protein, 291 aa, Neisseria
MFYQILALIIWGSSFIAAKYVYGGIDPALMVGVRLLIAALPALPACRRHVGKIPREEWKPLLIVSFVNYVLTLLLQFVGLKYTSAASASVIVGLEPLLMVFVGHFFFNDKARAYHWICGAAAFAGVALLMAGGAEEGGEVGWFGCLLVLLAGAGFCAAMRPTQRLIARIGAPAFTSVSIAAASLMCLPFSLALAQSYTVDWSVGMVLSLLYLGLGCGWYAYWLWNKGMSRVPANASGLLISLEPVVGVLLAVLILGEHLSPVSALGVFVVIAATFAAGRLSRRDAQNGNAV

SEQ ID NO: 125 - protein, 394 aa, Neisseria
  VARIANT (1)...(394): Xaa = Any Amino Acid
MRRFLPIAAICAXXLXXGLTAATGSTSSLADYFWWIVAFSAMLLLVLSAVLARYVILLLKDRRDGVFGSXXAKXPXXXMFTLVAXLPGVFLFGFPAQFINGTINSWFGNDTHEALERSLNLSKSALNLAADNALGNAVPVQIDLIGAASLPGDMGRVLEHYAGSGFAQLALYNXASGKIEKSINPHKLDQPFPGKARWEKIQRAGSVRDLESIGGVLYAQGWLSAGTHXGRDYALFFRQPVPKGVAEDAVLIEKARAKYAELSYSKKGLQTFFLATLLIASLLSIFLALVMALYFARRFVEPVLSLAEGAKAVAQGDFSQTRPVLRNDEFGRLTXLFNHMTEQLSIAKDADERNRRREEAARHYLECVLEGLTTGVVVFDEQGCLKTFNKAAGT

SEQ ID NO: 126 - protein, 706 aa, Neisseria
MRRFLPIAAICAVVLLYGLTAATGSTSSLADYFWWIVAFSAMLLLVLSAVLARYVILLLKDRRDGVFGSQIAKRLSGMFTLVAVLPGVFLFGVSAQFINGTINSWFGNDTHEALERSLNLSKSALNLAADNALGNAVPVQIDLIGAASLPGDMGRVLEHYAGSGFAQLALYNAASGKIEKSINPHKLDQPFPGKARWEKIQRAGSVRDLESIGGVLYAQGWLSAGTHNGRDYALFFRQPVPKGVAEDAVLIEKARAKYAELSYSKKGLQTFFLATLLIASLLSIFLALVMALYFARRFVEPVLSLAEGAKAVAQGDFSQTRPVLRNDEFGRLTKLFNHMTEQLSIAKEADERNRRREEAARHYLECVLEGLTTGVVVFDEQGCLKTFNKAAEQILGMPLTPLWGSSRHGWHGVSAQQSLLAEVFAAIGAAAGTDKPVHVKYAAPDDAKILLGKATVLPEDNGNGVVMVIDDITVLIHAQKEAAWGEVAKRLAHEIRNPLTPIQLSAERLAWKLGGKLDEQDAQILTRSTDTIVKQVAALKEMVEAFRNYARSPSLKLENQDLNALIGDVLALYEAGPCRFAAELAGEPLTVAADTTAMRQVLHNIFKNAAEAAEEADVPEVRVKSETGQDGRIVLTVCDNGKGFGREMLHNAFEPYVTDKPAGTGLGLPVVKKIIEEHGGRISLSNQDAGGACVRIILPKTVKTYA

SEQ ID NO: 127 - protein, 706 aa, Neisseria
  VARIANT (1)...(706): Xaa = Any Amino Acid
MRRFLPIAAICAVVLLYGLTAATGSTSSLADYFWWIVAFSAMLLLVLSAVLARYVILLLKDRRDGVFGSQIAKRLSGMFTLVAVLPGVFLFGVSAQFINGTINSWFGNDTHEALERSLNLSKSALNLAADNALGNAIPVQIDXIGAASLPXDMGRVLEHYAGSGFAQLALYNAASGKIEKSINPHKLDQPFPGKARWEKIQQAGSVRDXESIGGVLYAXGWLSAXTHNGRDYALFFRQPVPKGVAEDAVLIEKARAXXXXLSYSKKGLQTFFLATLLIASLLSIFLALVMALYFARRFVEPVLSLAEGAKAVAQGDFSQTRPVLRNDEFGRLTKLFNHMTEQLSIAKEADERNRRREEAARHYLECVLEGLTTGVVVFDEQGCLKTFNKAAEQILGMPLTPLWGSSRHGWHGVSAQQSLLAEVFAAIGAAAGTDKPVHVKYAAPDDAKILLGKATVLPEDNXNGVVMVIDDITVLIHAQKEAAWGEVAKRLAHEIRNPLTPIQLSAERLAWKLGGKLDEXDAQILTRSTDTIIKQVAALKEMVEAFRNYXRSPSXQLENQDLNALIGDVLALYEAGPCRFAAELAGEPLMMAADTTAMRQVLHNIFKNAAEAAEEADVPEVRVKSEAGQDGRIVLTVCDNGKGFGREMLHNAFEPYVTDKPAGTGLXLPVVKKIIEEHGGXISLSNQDAGGAXVRIILPKTVETYA

SEQ ID NO: 128 - protein, 400 aa, Neisseria
MRRFLPIAAICAVVLLYGLTAATGSTSSLADYFWWIVSFSAMLLLVLSAVLARYVILLLKDRRNGVFGSQIAKRLSGMFTLVAVLPGLFLFGISAQFINGTINSWFGNDTHEALERSLNLSKSALDLAADNAVSNAVPVQIDLIGTASLSGNMGSVLEHYAGSGFAQLALYNAASGKIEKSINPHQFDQPLPDKEHWEQIQQTGSVRSLESIGGVLYAQGWLSAGTHNGRDYALFFRQPIPENVAQDAVLIEKARAKYAELSYSKKGLQTFFLVTLLIASLLSIFLALVMALYFARRFVEPILSLAEGAKAVAQGDFSQTRPVLRNDEFGRLTKLFNHMTEQLSIAKEADERNRRREEAARHYLECVLDGLTTGVVVSYPLSCCRTAVFSTCHSSPLSYF

SEQ ID NO: 129 - protein, 706 aa, Neisseria
MRRFLPIAAICAVVLLYGLTAATGSTSSLADYFWWIVSFSAMLLLVLSAVLARYVILLLKDRRNGVFGSQIAKRLSGMFTLVAVLPGLFLFGISAQFINGTINSWFGNDTHEALERSLNLSKSALDLAADNAVSNAVPVQIDLIGTASLSGNMGSVLEHYAGSGFAQLALYNAASGKIEKSINPHQFDQPLPDKEHWEQIQQTGSVRSLESIGGVLYAQGWLSAGTHNGRDYALFFRQPIPENVAQDAVLIEKARAKYAELSYSKKGLQTFFLVTLLIASLLSIFLALVMALYFARRFVEPILSLAEGAKAVAQGDFSQTRPVLRNDEFGRLTKLFNHMTEQLSIAKEADERNRRREEAARHYLECVLDGLTTGVVVFDEKGRLKTFNKAAEQILGMPLAPLWGSSRHGWHGVSAQQSLLAEVFAAIGAAAGTDKPVQVEYAAPDDAKILLGKATVLPEDNGNGVVMVIDDITVLIRAQKEAAWGEVAKRLAHEIRNPLTPIQLSAERLAWKLGGKLDDQDAQILTRSTDTIIKQVAALKEMVEAFRNYARAPSLKLENQDLNALIGDVLALYEAGPCRFEAELAGEPLMMAADTTAMRQVLHNIFKNAAEAAEEADMPEVRVKSETGQDGRIVLTVCDNGKGFGKEMLHNAFEPYVTDKPAGTGLGLPVVKKIIGEHGGRISLSNQDAGGACVRIILPKTVETYA

SEQ ID NO: 130 - protein, 155 aa, Neisseria
MYAFTAAQQQKALFRLVLFHILIIAASNYLVQFPFQIFGIHTTWGAFSFPFIFLATDLTVRIFGSHLARRIIFWVMFPALLLSYVFSVLFHNGSWTGLGALSEFNTFVGRIALASFAAYAIGQILDIFVFNKLRRLKAWWIAPNASTVIGHALDT

SEQ ID NO: 131 - protein, 228 aa, Neisseria
MYAFTAAQQQKALFRLVLFHILIIAASNYLVQFPFQIFGIHTTWGAFSFPFIFLATDLTVRIFGSHLARRIIFWVMFPALLLSYVFSVLFHNGSWTGLGALSEFNTFVGRIALASFAAYAIGQILDIFVFNKLRRLKAWWIAPTASTVIGNALDTLVFFAVAFYASSDGFMAANWQGIAFVDYLFKLTVCTLFFLPAYGVILNLLTKKLTTLQTKQAQDRPAPSLQNP

SEQ ID NO: 132 - protein, 253 aa, Neisseria
  VARIANT (1)...(253): Xaa = Any Amino Acid
XISEQENCEDESCRIPTINSEQIDNMYAFTAAQQQKALFWLVLFHILIIAASNYLVQFPFQISGIHTTWGAFSFPFIFLATDLTVRIFGSHLARRIIFWVMFPALLLSYVFSVLFHNGSWTGLGALSEFNTFVGRIALASFAAYALGQILDIFVFNKLRRLKAWWVAPTASTVIGNALDTLVFFAVAFYASSDGFMAANWQGIAFVDYLFKLTVCGLFFLPAYGVILNLLTKKLTTLQTKQAQDRPAPSLQNP

SEQ ID NO: 133 - protein, 228 aa, Neisseria
MYALTAAQQQKALFRLVLFHILIIAASNYLVQFPFRIFGIHTTWGAFSFPFIFLATDLTVRIFGSHLARRIIFWVMFPALSLSYVFSVLFHNGSWTGLGAPSQFNTFVGRIALASFAAYALGQILDIFVFDKLRRLKAWWIAPAASTVIGNALDTLVFFAVAFYASSDEFMAANWQGIAFVDYLFKLTVCTLFFLPAYGVILNLLTKKLTALQTKQAQDRPVPSLQNP

SEQ ID NO: 134 - protein, 173 aa, Neisseria
  VARIANT (1)...(173): Xaa = Any Amino Acid
MVIKYTNLNFAKLSIIAILMMYSFEANANAVXISETVSVDTGQGAKIHKFVPKNSKTYSSDLIKTVDLTHXPTGAKARINAKITASVSRAGVLAGVGKLARLGAKFSTRAVPYVGTALLAHDVYETFKEDIQARGYQYDPETDKFVKGYEYSNCLWYEDKRRINRTYGCYGVD

SEQ ID NO: 135 - protein, 150 aa, Neisseria
MVIKYTNLNFAKLSIIAILMMYSFEANANAVKISETVSVDTGQGAKIHKFVPKNSKTYSSDLIKTVDLTHIPTGAKARINAKITASVSRAGVLAGVGKLARLGAKFSTRAVPYVGTALLAHDVYETFKEDIQARGYQYDPETDKFAKVSG

SEQ ID NO: 136 - protein, 150 aa, Neisseria; identical to SEQ ID NO: 135

SEQ ID NO: 137 - protein, 526 aa, Neisseria
MVTKHTNLNFAKLSIIAILMMYSFEANANAVKISETLSVDTGQGAKVHKFVPKSSNIYSSDLTKAVDLTHIPTGAKARINAKITASVSRAGVLSGVGKLVRQGAKFGTRAVPYVGTALLAHDVYETFKEDIQARGCRYDPETDKFVKGYEYANCLWYEDERRINRTYGCYGVDSSIMRLMPDRSRFPEVKQLMESQMYRLARPFWNWRKEELNKLSSLDWNNFVLNRCTFDWNGGGCAVNKGDDFRAGASFSLGRNPKYKEEMDAKKPEEILSLKVDADPDKYIEATGYPGYSEKVEVAPGTKVNMGPVTDRNGNPVQVAATFGRDAQGNTTADVQVIPRPDLTPASAEAPHAQPLPEVSPAENPANNPDPDENPGTRPNPEPDPDLNPDANPDTDGQPGTSPDSPAVPDRPNGRHRKERKEGEDGGLSCDYFPEILACQEMGKPSDRMFHDISIPQVTDDKTWSSHNFLPSNGVCPQPKTFHVFGRQYRASYEPLCVFAEKIRFAVLLAFIIMSAFVVFGSLGGE

SEQ ID NO: 138 - protein, 145 aa, Neisseria
MVTKHTNLNFAKLSIIAILMMYSFEANANAVKISETLSVDTGQGAKVHKFVPKSSNIYSSDLTKAVDLTHIPTGAKARINAKITASVSRAGVLSGVGKLVRQGAKFGTRAVPYVGTALLAHDVYETFKEDIQARGCRYDPETDKF

SEQ ID NO: 139 - protein, 76 aa, Neisseria
MRFFGIGFLVLLFLEIMSIVWVADWLGGGWTLFLMAAGFAAGVLMLRQTGLTGLLLAGAAMRSGGKVSVYQMLWPI

SEQ ID NO: 140 - protein, 161 aa, Neisseria
MRFFGIGFLVLLFLEIMSIVWVADWLGGGWTLFLMAAGFAAGVLMLRHTGLSGLLLAGAAMRSGGRVSVYQMLWPIRYTVAAVCLMSPGFVSSVLAVLLLLPFKGGAVLQAGGAENFFNMNQSGRKEGFSRDDDIIEGEYTVEEPYGGNRSRNAIEHKKDE

SEQ ID NO: 141 - protein, 161 aa, Neisseria
  VARIANT (1)...(161): Xaa = Any Amino Acid
MRFFGIGFLVLLFLEIMSIVWVADWLGGGWTLFLMAATFAAGVVMLRHTGLSGLLLAGAAMRSGGRVSVYXMLWXIRYTVAAVCXMSPGFVSSVXAVLLXLPFKGGAVLQAGGAENFFNMNXSGRKXGXSRDDDIIEGEYTVEXPYGGXRFRNAXEHKKDE

SEQ ID NO: 142 - protein, 161 aa, Neisseria
MRFFGIGFLVLLFLEIMSIVWVADWLGGGWTLFLMAATFAAGVLMLRHTGLSGLLLAGAAVKSSGKVSVYQMLWPIRYTVAAVCLMSPGFVSSVLAVLLLLPFKGGAVLQAGGAENFFNMNQSGRKEGFFHDDDIIEGEYTVEKPDGGNRSRNAIEHEKDE

SEQ ID NO: 143 - protein, 292 aa, Neisseria
  VARIANT (1)...(292): Xaa = Any Amino Acid
MFVFQTAFXMFQKHLQKASDSVVGGTLYVVATPIGNLADITLRALAVLQKAXXXXAEDTRVTAQLLSAYGIQGKLVSVREHNERQMADKIVGYLSDGMVVAQVSDAGTPAVCDPGAKLARRVREAGFKVVPVVGAXAVMAALSVAGVEGSDFYFNGFVPPKSGERRKLFAKWVRAAFPIVMFETPHRIGAALADMAELFPERRLMLAREITKTFETFLSGTVGEIQTALSADGDQSRGEMVLVLYPAQDEKHEGLSESAQNIMKILTAELPTKQAAELAAKITGEGKKALYD

SEQ ID NO: 144 - protein, 291 aa, Neisseria
MFQKHLQKASDSVVGGTLYVVATPIGNLADITLRALAVLQKADIICAEDTRVTAQLLSAYGIQGKLVSVREHNERQMADKIVGYLSDGMVVAQVSDAGTPAVCDPGAKLARRVREAGFKVVPVVGASAVMAALSVAGVEGSDFYFNGFVPPKSGERRKLFAKWVRAAFPIVMFETPHRIGATLADMAELFPERRLMLAREITKTFETFLSGTVGEIQTALSADGNQSRGEMVLVLYPAQDEKHEGLSESAQNIMKILTAELPTKQAAELAAKITGEGKKALYDLALSWKNK

SEQ ID NO: 145 - protein, 291 aa, Neisseria
MFQKHLQKASDSVVGGTLYVVATPIGNLADITLRALAVLQKADIICAEDTRVTAQLLSAYGIQGKLVSVREHNERQMADKIVGYLSDGMVVAQVSDAGTPAVCDPGAKLARRVREVGFKVVPVVGASAVMAALSVAGVAGSDFYFNGFVPPKSGERRKLFAKWVRVAFPVVMFETPHRIGATLADMAELFPERRLMLAREITKTFETFLSGTVGEIQTALAADGNQSRGEMVLVLYPAQDEKHEGLSESAQNIMKILTAELPTKQAAELAAKITGEGKKALYDLALSWKNK

SEQ ID NO: 146 - protein, 300 aa, Neisseria
MSVFQTAFFMFQKHLQKASDSVVGGTLYVVATPIGNLADITLRALAVLQKADIICAEDTRVTAQLLSAYGIQGRLVSVREHNERQMADKVIGFLSDGLVVAQVSDAGTPAVCDPGAKLARRVREAGFKVVPVVGASAVMAALSVAGVAESDFYFNGFVPPKSGERRKLFAKWVRAAFPVVMFETPHRIGATLADMAELFPERRLMLAREITKTFETFLSGTVGEIQTALAADGNQSRGEMVLVLYPAQDEKHEGLSESAQNAMKILAAELPTKQAAELAAKITGEGKKALYDLALSWKNK

SEQ ID NO: 147 - protein, 291 aa, Neisseria
MFQKHLQKASDSVVGGTLYVVATPIGNLADITLRALAVLQKADIICAEDTRVTAQLLSAYGIQGRLVSVREHNERQMADKVIGFLSDGLVVAQVSDAGTPAVCDPGAKLARRVREAGFKVVPVVGASAVMAALSVAGVAESDFYFNGFVPPKSGERRKLFAKWVRAAFPVVMFETPHRIGATLADMAELFPERRLMLAREITKTFETFLSGTVGEIQTALAADGNQSRGEMVLVLYPAQDEKHEGLSESAQNAMKILAAELPTKQAAELAAKITGEGKKALYDLALSWKNK

SEQ ID NO: 148 - protein, 251 aa, Neisseria
  VARIANT (1)...(251): Xaa = Any Amino Acid
MKQKKTAAAVIAAMLAGFAAXKAPEIDPALXXXXXXXXXXXXXXXXXXXXXXXXXXXXXXXXXXXXXXXXXXXXXXXXXXXXXXXXXXXXXXXXXXXXXXXXXXXXXXXXXXXXXXXXXXXXXXXXXXXXXXXXXXXXXXXXXXXXXXXXXXXXXXXXXXXXXXXXXXXXXXXXXXXXXXXXXXXXXXXXXXXXXXXXXXXXXXXXXXXXXXXXXXXXXXELVRNQLEQGLRQEKARLKIDALLEENGVKP

SEQ ID NO: 149 - protein, 252 aa, Neisseria
MKQKKTAAAVIAAMLAGFAAAKAPEIDPALVDTLVAQIMQQADRHAEQSQKPDGQAIRNDAVRRLQTLEVLKNRALKEGLDKDKDVQNRFKIAEASFYAEEYVRFLERSETVSEDELHKFYEQQIRMIKLQQVSFATEEEARQAQQLLLKGLSFEGLMKRYPNDEQAFDGFIMAQQLPEPLASQFAAMNRGDVTRDPVKLGERYYLFKLSEVGKNPDAQPFELVRNQLEQGLRQEKARLKIDALLEENGVKP

SEQ ID NO: 150 - protein, 252 aa, Neisseria
MKQKKTAAAVIAAMLAGFAAAKAPEIDPALVDTLVAQIMQQADRHAEQSQKPDGQAIRNDAVRRLQTLEVLKNRALKEGLDKDKDVQNRFKIAEASFYAEEYVRFLERSETVSESALRQFYERQIRMIKLQQVSFATEEEARQAQQLLLKGLSFEGLMKRYPNDEQAFDGFIMAQQLPEPLASQFAAMNRGDVTRDPVKLGERYYLFKLSEVGKNPDAQPFELVRNQLEQGLRQEKARLKIDAILEENGVKP

SEQ ID NO: 151 - protein, 252 aa, Neisseria
MKQKKTAAAVIAAMLAGFAAAKAPEIDPALVDTLVAQIMQQADRHAEQSQRPDGQAIRNDAVRRLQTLEVLKNRALKEGLDKDKDVQNRFKIAEASFYAEEYVRFLERSETVSESALRQFYERQIRMIKLQQVSFATEEEARQAQQLLLKGLSFEGLMKRYPNDEQAFDGFIMAQQLPEPLASQFAGMNRGDVTRNPVKLGERYYLFKLGAVGKNPDAQPFELVRNQLEQGLRQEKARLKIDALLEENGVKP

SEQ ID NO: 152 - protein, 524 aa, Neisseria
  VARIANT (1)...(524): Xaa = Any Amino Acid
MKKSFLTLVLYSSLLTASEIAYPLELGIETLPAAKIAETFALTFVIAALYLFARNKVTRLLIAVFFAFSIIANNVHYADYQSWMTXXXXXXXXXXXXXXXXXXXXXXXXXXXXXXXXXXXXXXXXXXXXXXXXXXXXXXXXXXXXXXXXXXXXXXXXXXXXXXXXXXXXXXXXXXXXXXXXXXXXXXXXXXXXXXXXXXXXXXXXXXXXXXXXXXXXXXXXXXXXXXXXXXXXXXXXXXXXXXXXXXXXXXXXXXXXXXXXXXXXXXXXXXXXXXXXXXXXXXXXXXXXXXXXXXXXXXXXXXXXXXXXXXXXXXXXXXXXXXXXXXXXXXXXXXXXXXXXXXXXXXXXXXXXXXXXXXXXXXXXXXXXXXXXXXXXXXXXXXXXXXXXXXXXXXXXXXXXXXQTVFEQLQKTPDGNWLFAYTSDHGQYVRQDIYNQGTVQPDSYLVPLVLYSPDKAVQQAANQAFAPCEIAFHQQLSTFLIHTLGYDMPVSGCREGSVTGNLITGDAGSLNIRDGKAEYVYPQ

SEQ ID NO: 153 - protein, 524 aa, Neisseria
MKKSFLTLVLYSSLLTASEIAYRFVFGIETLPAAKIAETFALTFVIAALYLFARYKVTRLLIAVFFAFSIIANNVHYAVYQSWMTGINYWLMLKEVTEVGSAGASMLDKLWLPVLWGVLEVMLFCSLAKFRRKTHFSADILFAFLMLMIFVRSFDTKQEHGISPKPTYSRIKANYFSFGYFVGRVLPYQLFDLSRIPAFKQPAPSKIGQGSVQNIVLIMGESESAAHLKLFGYGRETSPFLTRLSQADFKPIVKQSYSAGFMTAVSLPSFFNAIPHANGLEQISGGDTNMFRLAKEQGYETYFYSAQAENEMAILNLIGKKWIDHLIQPTQLGYGNGDNMPDEKLLPLFDKINLQQGKHFIVLHQRGSHAPYGALLQPQDKVFGEADIVDKYDNTIHKTDQMIQTVFEQLQKQPDGNWLFAYTSDHGQYVRQDIYNQGTVQPDSYLVPLVLYSPDKAVQQAANQAFAPCEIAFHQQLSTFLIHTLGYDMPVSGCREGSVTGNLITGDAGSLNIRDGKAEYVYPQ

SEQ ID NO: 154 - protein, 424 aa, Neisseria
MKKSLFVLFLYSSLLTASEIAYRFVFGIETLPAAKMAETFALTFVIAALYLFARYKATRLLIAVFFAFSIIANNVHYAVYQSWITGINYWLMLKEITEVGGAGASMLDKLWLPALWGVLEVMLFCSLAKFRRKTHFSADILFAFLMLMIFVRSFDTKQEHGISPKPTYSRIKANYFSFGYFVGRVLPYQLFDLSKIPVFKQPAPSRIGQGSIQNIVLIMGESESAAHLKLFGYGRETSPFLTQLSQADFKPIVKQSYSAGFMTAVSLPSFFNVIPHANGLEQISGGDIVDKYDNTIHKTDQMIQTVFEQLQKQPDGNWLFAYTSDHGQYVRQDIYNQGTVQPDSYLVPLVLYSPDKAVQQAANQAFAPCEIAFHQQLSTFLIHTLGYDMPVSGCREGSVTGNLITGDAGSLNIRDGKAEYVYPQ

SEQ ID NO: 155 - protein, 524 aa, Neisseria
MKKSLFVLFLYSSLLTASEIAYRFVFGIETLPAAKMAETFALTFMIAALYLFARYKASRLLIAVFFAFSMIANNVHYAVYQSWMTGINYWLMLKEVTEVGSAGASMLDKLWLPALWGVAEVMLFCSLAKFRRKTHFSADILFAFLMLMIFVRSFDTKQEHGISPKPTYSRIKANYFSFGYFVGRVLPYQLFDLSKIPVFKQPAPSKIGQGSIQNIVLIMGESESAAHLKLFGYGRETSPFLTRLSQADFKPIVKQSYSAGFMTAVSLPSFFNVIPHANGLEQISGGDTNMFRLAKEQGYETYFYSAQAENQMAILNLIGKKWIDHLIQPTQLGYGNGDNMPDEKLLPLFDKINLQQGRHFIVLHQRGSHAPYGALLQPQDKVFGEADIVDKYDNTIHKTDQMIQTVFEQLQKQPDGNWLFAYTSDHGQYVRQDIYNQGTVQPDSYIVPLVLYSPDKAVQQAANQAFAPCEIAFHQQLSTFLIHTLGYDMPVSGCREGSVTGNLITGDAGSLNIRNGKAEYVYPQ

SEQ ID NO: 156 - protein, 197 aa, Neisseria
  VARIANT (1)...(197): Xaa = Any Amino Acid
TLLLFIPLVLTXCGTLTGILAHGGGKRFAVEQELVAASSRAAVKEMDLSALKGRKAAXYVSVMGDQGSGNISGGRYSIDALIRGGYHNNPESATQYSYPAYDTTATTKSDALSSVTTSTSLLNAPAAXLTKNSGRKGERSAGLSVNGTGDYRNETLLANPRDVSFLTNLIQTVFYLRGIEVVPPXYADTDVFVTVDV

SEQ ID NO: 157 - protein, 313 aa, Neisseria
MKTLLLLIPLVLTACGTLTGIPAHGGGKRFAVEQELVAASSRAAVKEMDLSALKGRKAALYVSVMGDQGSGNISGGRYSIDALIRGGYHNNPESATQYSYPAYDTTATTKSDALSSVTTSTSLLNAPAAALTKNSGRKGERSAGLSVNGTGDYRNETLLANPRDVSFLTNLIQTVFYLRGIEVVPPEYADTDVFVTVDVFGTVRSRTELHLYNAETLKAQTKLEYFAVDRDSRKLLITPKTAAYESQYQEQYALWTGPYKVSKTVKASDRLMVDFSDITPYGDTTAQNRPDFKQNNGKKPDVGNEVIRRRKGG

SEQ ID NO: 158 - protein, 313 aa, Neisseria
  VARIANT (1)...(313): Xaa = Any Amino Acid
MKTLLXLIPLVLTACGTLTGIPAHGGGKRFAVEQELVAASSRAAVKEMDLSALKGRKAALYVSVMGDQGSGNISGGRYSIDALIRGGYHNNPESATQYSYPAYDTTATTKSDALSSVTTSTSLLNAPAAALTKNSGRKGERSAGLSVNGTGDYRNETLLANPRDVSFLTNLIQTVFYLRGIEVVPPEYADTDVFVTVDVFGTVRSRTELHLYNAETLKAQTKLEYFAVDRDSRKLLIAPKTAAYESQYQEQYALWMGPYSVGKTVKASDRLMVDFSDITPYGDTTAQNRPDFKQNNGKKPDVGNEVIRRRKGG

SEQ ID NO: 159 - protein, 313 aa, Neisseria
MKTLLLLIPLVLTACGTLTGIPAHGGGKRFAVEQELVAASSRAAVKEMDLSALKGRKAALYVSVMGDQGSGNISGGRYSIDALIRGGYHNNPDSATRYSYPAYDTTATTKSDALSGVTTSTSLLNAPAAALTKNNGRKGERSAGLSVNGTGDYRNETLLANPRDVSFLTNLIQTVFYLRGIEVVPPEYADTDVFVTVDVFGTVRSRTELHLYNAETLKAQTKLEYFAVDRDSRKLLIAPKTAAYESQYQEQYALWMGPYSVGKTVKASDRLMVDFSDITPYGDTTAQNRPDFKQNNGKNPDVGNEVIRRRKGG

SEQ ID NO: 160 - protein, 395 aa, Neisseria
  VARIANT (1)...(395): Xaa = Any Amino Acid
MAEICLITGTPGSGKTLKMVSMMANDEMFKPDEKAIRRKVFTNIKGLKIPHTYIETDAKKLPKSTDEQLSAHDMYEWIKKPENIGSIVIVDEAQDVWPARSAGSKIPENVQWLNTHRHQGIDIFVLTQGPKLLDQNLRTLVRKHYHIASNKMGMRTLLEWKICADDPVKMASSAFSSIYTLDKKVYDLYXXAEVHTVNKVKRSKWFYTLPVIVLLIPVFVGLSYKMLSSYGKKQEEPAAQESAATEQQAVLPDKTEGEPVNNGNLTADMFVPTLSEKPXSKPIYNGVRQVRTFEYIAGCIEGGRTGCACYSHQGTALKEVTELMCKDYVKNGLPFNPYKEESQGQEVQQSAQQHSDRAQVATLGGKPXQNLMYDNWEERGKPFEGIGGGVVGSAN

SEQ ID NO: 161 - protein, 394 aa, Neisseria
MAEICLITGTPGSGKTLKMVSMMANDEMFKPDENGIRRKVFTNIKGLKIPHTYIETDAKKLPKSTDEQLSAHDMYEWIKKPENIGSIVIVDEAQDVWPARSAGSKIPENVQWLNTHRHQGIDIFVLTQGPKLLDQNLRTLVRKHYHIASNKMGMRTLLEWKICADDPVKMASSAFSSIYTLDKKVYDLYESAEVHTVNKVKRSKWFYTLPVIVLLIPVFVGLSYKMLSSYGKKQEEPAAQESAATEQQAVLPDKTEGEPVNNGNLTADMFVPTLSEKPESKPIYNGVRQVRTFEYIAGCIEGGRTGCACYSHQGTALKEVTELMCKDYVKNGLPFNPYKEESQGQEVQQSAQQHSDRAQVATLGGKPQNLMYDNWEERGKPFEGIGGGVVGSAN

SEQ ID NO: 162 - protein, 395 aa, Neisseria
MAEICLITGTPGSGKTLKMVSMMANDEMFKPDENGIRRKVFTNIKGLKIPHTYIETDAKKLPKSTDEQLSAHDMYEWIKKPENIGSIVIVDEAQDVWPARSAGSKIPENVQWLNTHRHQGIDIFVLTQGSKLLDQNLRTLVRKHYHIASNKMGMRTLLEWKICADDPVKMASSAFSSIYTLDKKVYDLYESAEVHTVNKVKRSKWFYTLPVIILLIPVFVGLSYKMLSSYGKKQEEPAAQESAATEHQAVFQDKTEGEPVNNGNLTADMFVPTLSEKPESKPIYNGVRQVRTFEYIAGCVEGGRTGCTCYSHQGTALKEITKEMCKDYARNGLPFNPYKEESQGRDVQQSEQHHSDRPQVATLGGKPWQNLMYDNWQERGKPFEGIGGGVVGSAN

SEQ ID NO: 163 - protein, 395 aa, Neisseria
MAEICLITGTPGSGKTLKMVSMMANDEMFKPDENGVRRKVFTNIKGLKIPHTHIETDAKKLPKSTDEQLSAHDMYEWIKKPENVGAIVIVDEAQDVWPARSAGSKIPENVQWLNTHRHQGIDIFVLTQGPKLLDQNLRTLVKRHYHIAANKMGLRTLLEWKVCADDPVKMASSAFSSIYTLDKKVYDLYESAEIHTVNKVKRSKWFYALPVIILLIPLFVGLSYKMLGSYGKKQEEPAAQESAATEQQAVLPDKTEGESVNNGNLTADMFVPTLPEKPESKPIYNGVRQVRTFEYIAGCIEGGRTGCTCYSHQGTALKEVTELMCKDYVKNGLPFNPYKEESQGQEVQQSAQQHSDRAQVATLGGKPQQNLMYDNWEERGKPFEGIGGGVVGSAN

SEQ ID NO: 164 - protein, 371 aa, Neisseria
  VARIANT (1)...(371): Xaa = Any Amino Acid
MVFLNADNGILVQDLPFEVKLKKFHIDFYNTGMPRDFASDIEVTDKATGEKLERTIRVNHPLTLHGITIYQASFADGGSDLTFKAWNLGDASREPVVLKATSIHQFPLEIGKHKYRLEFDQFTSMNVEDMSEGAEREKSLKSTLPDVRAVTQEGHKYTNXXXXXXYRIRDAPGQAVEYKNYMLPVLQEQDYFWITGTRSXLQQQYRWLRIPLDKQLKADTFMALREFLKDGEGRKRXVADATKGAPAEIREQFMLAAENTLNIFAQKGYLGLDEFITSNIPKEQQDKMQGYFYEMLYGVMNAALDETXTRYGLPEWQQDEARNRFLLHSMDAYTGLTEYPAPMLLQLDGFSEVRSSGLQMTRSXGPLLVYL

SEQ ID NO: 165 - protein, 671 aa, Neisseria
MSKSRRSPPLLSRPWFAFFSSMRFAVALLSLLGIASVIGTVLQQNQPQTDYLVKFGSFWAQIFGFLGLYDVYASAWFVVIMMFLVVSTSLCLIRNVPPFWREMKSFREKVKEKSLAAMRHSSLLDVKIAPEVAKRYLEVQGFQGKTINREDGSVLIAAKKGTMNKWGYIFAHVALIVICLGGLIDSNLLLKLGMLTGRIVPDNQAVYAKDFKPESILGASNLSFRGNVNISEGQSADVVFLNADNGILVQDLPFEVKLKKFHIDFYNTGMPRDFASDIEVTDKATGEKLERTIRVNHPLTLHGITIYQASFADGGSDLTFKAWNLGDASREPVVLKATSIHQFPLEIGKHKYRLEFDQFTSMNVEDMSEGAEREKSLKSTLNDVRAVTQEGKKYTNIGPSIVYRIRDAAGQAVEYKNYMLPVLQEQDYFWITGTRSGLQQQYRWLRIPLDKQLKADTFMALREFLKDGEGRKRLVADATKGAPAEIREQFMLAAENTLNIFAQKGYLGLDEFITSNIPKEQQDKMQGYFYEMLYGVMNAALDETIRRYGLPEWQQDEARNRFLLHSMDAYTGLTEYPAPMLLQLDGFSEVRSSGLQMTRSPGALLVYLGSVLLVLGTVLMFYVREKRAWVLFSDGKIRFAMSSARSERDLQKEFPKHVESLQRLGKDLNHD

SEQ ID NO: 166 - protein, 671 aa, Neisseria; identical to SEQ ID NO: 165

SEQ ID NO: 167 - protein, 434 aa, Neisseria
  VARIANT (1)...(434): Xaa = Any Amino Acid
MVFLNADNGMLVQDLPFEVKLKKFHIDFYNTGMPRDFASDIEVTDKATGEKLERTIRVNHPLTLHGITIYQASFADGGSDLTFKAWNLRDASREPVVLKATSIHQFPLEIGKHKYRLEFDQFTSMNVEDMSEGAEREKSLKSTLNDVRAVTQEGKKYTNIGPSIVYRIRDAAGQAVEYKNYMLPILQDKDYFWLTGTRSGLQQQYRWLRIPLDKQLKADTFMALREFLKDGEGRKRLVADATKDAPAEIREQFMLAAENTLNIFAQKGYLGLDEFITSNIPKGQQDKMQGYFYEMLYGVMNAALDETIRRYGLPEWQQDEARNRFLLHSMDAYTGLTEYPAPMLLQLDGFSEVRSSGLQMTRSPGALLVYLGSVLLVLGTVFMFYVPKKRAWVLFSNXKIRFAMSSARSERDLQKEFPKHVESLQRLGKDLNHD

SEQ ID NO: 168 - protein, 671 aa, Neisseria
MSKSRISPTLLSRPWFAFFSSMRFAVALLSLLGIASVIGTVLQQNQPQTDYLVKFGPFWTRIFDFLGLYDVYASAWFVVIMMFLVVSTSLCLIRNVPPFWREMKSFREKVKEKSLAAMRHSSLLDVKIAPEVAKRYLEVRGFQGKTVSREDGSVLIAAKKGTMNKWGYIFAQVALIVICLGGLIDSNLLLKLGMLAGRIVPDNQAVYAKDFKPESILGASNLSFRGNVNISEGQSADVVFLNADNGMLVQDLPFEVKLKKFHIDFYNTGMPRDFASDIEVTDKATGEKLERTIRVNHPLTLHGITIYQASFADGGSDLTFKAWNLRDASREPVVLKATSIHQFPLEIGKHKYRLEFDQFTSMNVEDMSEGAEREKSLKSTLNDVRAVTQEGKKYTNIGPSIVYRIRDAAGQAVEYKNYMLPILQDKDYFWLTGTRSGLQQQYRWLRIPLDKQLKADTFMALREFLKDGEGRKRLVADATKDAPAEIREQFMLAAENTLNIFAQKGYLGLDEFITSNIPKGQQDKMQGYFYEMLYGVMNAALDETIRRYGLPEWQQDEARNRFLLHSMDAYTGLTEYPAPMLLQLDGFSEVRSSGLQMTRSPGALLVYLGSVLLVLGTVFMFYVREKRAWVLFSDGKIRFAMSSARSERDLQKEFPKHVESLQRLGKDLNHD

SEQ ID NO: 169 - protein, 162 aa, Neisseria
  VARIANT (1)...(162): Xaa = Any Amino Acid
MMSNXMXQKGFTLIXXMIVVAILGIISVIAIPSYXSYIEKGYQSQLYTEMXGINNISKQFILKNPLDDNQTIENKLEIFVSGYKMNPKIAKKYSVSVKFVDKEKSRAYRLVGVPKAGTGYTLSVWMNSVGDGYKCRDAASAQAHLETLSSDVGCEAFSNRKK

SEQ ID NO: 170 - protein, 162 aa, Neisseria
MMSNKMEQKGFTLIEMMIVVAILGIISVIAIPSYQSYIEKGYQSQLYTEMVGINNISKQFILKNPLDDNQTIENKLEIFVSGYKMNPKIAKKYSVSVKFVDKEKSRAYRLVGVPKAGTGYTLSVWMNSVGDGYKCRDAASAQAHLETLSSDVGCEAFSNRKK

SEQ ID NO: 171 - protein, 162 aa, Neisseria
  VARIANT (1)...(162): Xaa = Any Amino Acid
MMSNKMEQKGFTLIXXXXXXAIXXXXSVIXXXXYXSYIEKGYQSQLYTEMVGINNISKQXILKNPLDDNQTIKSKLEIFVSGYKMNPKIAEKYNVSVHFVNEEKPRAYSLVGVPKTGTGYTLSVWMNSVGDGYKCRDAASARAHLETLSSDVGCEAFSNRKK

SEQ ID NO: 172 - protein, 162 aa, Neisseria
MMSNKMEQKGFTLIEMMIVVTILGIISVIAIPSYQSYIEKGYQSQLYTEMVGINNVLKQFILKNPQDDNDTLKSKLKIFVSGYKMNPKIAKKYSVSVRFVDAEKPRAYRLVGVPNAGTGYTLSVWMNSVGDGYKCRDATSAQAYSDTLSADSGCEAFSNRKK

SEQ ID NO: 173 - protein, 93 aa, Neisseria
  VARIANT (1)...(93): Xaa = Any Amino Acid
MKKSSLISALGIGILSIGMAFAAPADAVSQIRQNATQVLSILKNGDANTARQKAEAYAIPYFDFQRMTALAVGNPWXTXSDXQKQALAXEFQP

SEQ ID NO: 174 - protein, 196 aa, Neisseria
MKKSSLISALGIGILSIGMAFAAPADAVSQIRQNATQVLSILKNGDANTARQKAEAYAIPYFDFQRMTALAVGNPWRTASDAQKQALAKEFQTLLIRTYSGTMLKLKNANVNVKDNPIVNKGGKEIIVRAEVGVPGQKPVNMDFTTYQSGGKYRTYNVAIEGASLVTVYRNQFGEIIKAKGVDGLIAELKAKNGGK

SEQ ID NO: 175 - protein, 196 aa, Neisseria
MKKSSFISALGIGILSIGMAFAAPADAVNQIRQNATQVLSILKSGDANTARQKAEAYAIPYFDFQRMTALAVGNPWRTASDAQKQALAKEFQTLLIRTYSGTMLKLKNANVNVKDNPIVNKGGKEIIVRAEVGVPGQKPVNMDFTTYQSGGKYRTYNVAIEGASLVTVYRNQFGEIIKAKGVDGLIAELKAKNGSK

SEQ ID NO: 176 - protein, 196 aa, Neisseria
VKKSSFISALGIGILSIGMAFASPADAVGQIRQNATQVLTILKSGDAASARPKAEAYAVPYFDFQRMTALAVGNPWRTASDAQKQALAKEFQTLLIRTYSGTMLKFKNATVNVKDNPIVNKGGKEIVVRAEVGIPGQKPVNMDFTTYQSGGKYRTYNVAIEGTSLVTVYRNQFGEIIKAKGIDGLIAELKAKNGGK

SEQ ID NO: 177 - protein, 196 aa, Neisseria
MKKSSFISALGIGILSIGMAFASPADAVGQIRQNATQVLTILKSGDAASARPKAEAYAVPYFDFQRMTALAVGNPWRTASDAQKQALAKEFQTLLIRTYSGTMLKFKNATVNVKDNPIVNKGGKEIVVRAEVGIPGQKPVNMDFTTYQSGGKYRTYNVAIEGTSLVTVYRNQFGEIIKAKGIDGLIAELKAKNGGK

SEQ ID NO: 178 - protein, 159 aa, Neisseria
  VARIANT (1)...(159): Xaa = Any Amino Acid
MKHILPLIAASALCISTASAHPASEPSTQNETAMITHTLISKYSFGXXXXXXXXAIKSKGMDIFAVIDHQEAARRNGLTMQPAKVIVFGTPKAGTPLMVKDPAFALQLPLRVLVTETDGKVRAAYTDTRALIAGSRIGFDEVANTLANAEKLIQKTVGE

SEQ ID NO: 179 - protein, 159 aa, Neisseria
MKHILPLIAASALCISTASAHPASEPSTQNETAMTTHTLTSKYSFDETVSRLETAIKSKGMDIFAVIDHQEAARRNGLTMQPAKVIVFGTPKAGTPLMVKDPAFALQLPLRVLVTETDGKVRAAYTDTRALIAGSRIGFDEVANTLANAEKLIQKTVGE

SEQ ID NO: 180 - protein, 159 aa, Neisseria
  VARIANT (1)...(159): Xaa = Any Amino Acid
MXHILPLXXASALCISTASXHPASEPQTQNETAMTTHTLTSKYSFDETVSRLETAIKSKGMDIFAVIDHQEAARRNGLTMQPAKVIVFGTPKAGTPLMVKDPAFALQLPLRVXVTETDGKVRAAYTDTRALIAGSRIGFDEVANTLANAEKLIQKTIGE

SEQ ID NO: 181 - protein, 159 aa, Neisseria
MKHILPPIAASAFCISTASAHPAGKPPTQNETAMTTHTLTSKYSFDETVSRLETAIKSKGMDIFAVIDHQEAARRNGLTMQPAKVIVFGTPKAGTPLMVKDPAFALQLPLRVLVTETDGKVRTAYTDTRALIVGSRISFDEVANTLANAEKLIQKTVGE

SEQ ID NO: 182 - protein, 159 aa, Neisseria
MKHILPLIAASALCISTASAHPAGKPPTQNETAMTTHTLTSKYSFDETVSRLETAIKSKGMDIFAVIDHQEAARRNGLTMQPAKVIVFGTPKAGTPLMVKDPAFALQLPLRVLVTETDGKVRTAYTDTRALIVGSRISFDEVANTLANAEKLIQKTVGE

SEQ ID NO: 183 - protein, 198 aa, Neisseria
MAFITRLFKSSKWLIVPLMLPAFQNVAAEGIDVSRAEARITDGGQLSISSRFQTELPDQLQQALRRGVPLNFTLSWQLSAPIIASYRFKLGQLIGDDDNIDYKLSFHPLTKRYRVTVGAFSTDYDTLDAALRATGAVANWKVLNKGALSGAEAGETKAEIRLTLSTSKLPKPFQINALTSQNWHLDSGWKPLNIIGNK

SEQ ID NO: 184 - protein, 198 aa, Neisseria
MAFITRLFKSSKWLIVPLMLPAFQNVAAEGIDVSRAEARITDGGQLSISSRFQTELPDQLQQALRRGVPLNFTLSWQLSAPIIASYRFKLGQLIGDDDNIDYKLSFHPLTNRYRVTVGAFSTDYDTLDAALRATGAVANWKVLNKGALSGAEAGETKAEIRLTLSTSKLPKPFQINALTSQNWHLDSGWKPLNIIGNK

SEQ ID NO: 185 - protein, 199 aa, Neisseria
  VARIANT (1)...(199): Xaa = Any Amino Acid
MAFITRLFKSIKQWLVLLPMLSVLPDAAAEGIDVSRAEARIXDGGQLSXXSRFQTELPDQLQXAXXRGVXLNXTLXWQLSAPIIASYRFXLGQLIGDDDXIDYKLSFHPLTNRYRVTVGAFSTXYDTLDAALRATGAVANWKVLNKGALSGAEAGETKAEIRLTLSTSKLPKPFQINALTSQNWHLDSGWKPLNIIGNK

SEQ ID NO: 186 - protein, 199 aa, Neisseria
MAFITRLFKSIKQWLVLLPILSVLPDAAAEGIAATRAEARITDGGRLSISSRFQTELPDQLQQALRRGVPLNFTLSWQLSAPTIASYRFKLGQLIGDDDNIDYKLSFHPLTNRYRVTVGAFSTDYDTLDAALRATGAVANWKVLNKGALSGAEAGETKAEIRLTLSTSKLPKPFQINALTSQNWHLDSGWKPLNIIGNK

SEQ ID NO: 187 - protein, 474 aa, Neisseria
  VARIANT (1)...(474): Xaa = Any Amino Acid
MDTKEILXYAAGSIGSAVLAVIILPLLSWYFPADDIGRIVLMQTAAGLTVSVLCLGLDQAYVREYYATADKDTLFKTLFLPPLLSAAAIAALLLSRPSLPSEILFSLDDAAAGIGLVLFELSFLPIRFLLLVLRMEGRALAFSSAQLVPKLAILLLXPLTVGLLHFPANTAVLTAVYALANLAAAAFLLFQNRCRLKAVRHAPFSPAVLHRGXRYGIPIALSSIAYWGLASADRLFLKKYAGLEQLGVYSMGISFGGAALLFQSIFSTVWTPYIFRAIEENAPPARLSATAESAAALLASALCXTGIFSPLASLLLPENYAAVRFIVVSCMXPPLFCTLAEISGIGLNVVRKTRPIALATLGALAANLLLLGLDRAVPARPXGAAVACAASFWLFFAFKTESSCRLWQPLKRLPLYLHTLFCLTSSAAYTCFGTPANYPLFAGVWAAYLAGCILRHRKDLHKLFHYLKKQGFPL

SEQ ID NO: 188 - protein, 473 aa, Neisseria
MDTKEILGYAAGSIGSAVLAVIILPLLSWYFPADDIGRIVLMQTAAGLTVSVLCLGLDQAYVREYYATADKDTLFKTLFLPPLLSAAAIAALLLSRPSLPSEILFSLDDAAAGIGLVLFELSFLPIRFLLLVLRMEGRALAFSSAQLVPKLAILLLLPLTVGLLHFPANTAVLTAVYALANLAAAAFLLFQNRCRLKAVRHAPFSPAVLHRGLRYGIPIALSSIAYWGLASADRLFLKKYAGLEQLGVYSMGISFGGAALLFQSIFSTVWTPYIFRAIEENAPPARLSATAESAAALLASALCLTGIFSPLASLLLPENYAAVRFIVVSCMLPPLFCTLAEISGIGLNVVRKTRPIALATLGALAANLLLLGLAVPSGGARGAAVACAASFWLFFAFKTESSCRLWQPLKRLPLYLHTLFCLTSSAAYTCFGTPANYPLFAGVWAAYLAGCILRHRKDLHKLFHYLKKQGFPL

SEQ ID NO: 189 - protein, 473 aa, Neisseria
MDTKEILGYAAGSIGSAVLAVIILPLLSWYFPADDIGRIVLMQTAAGLTVSVLCLGLDQAYVREYYAAADKDTLFKTLFLPPLLSAAAIAALLLSRPSLPSEILFSLDDAAAGIGLVLFELSFLPIRFLLLVLRMEGRALAFSSAQLVSKLAILLLLPLTVGLLHFPANTAVLTAVYALANLAAAAFLLFQNRCRLKAVRRAPFSSAVLHRGLRYGIPIALSSIAYWGLASADRLFLKKYAGLEQLGVYSMGISFGGAALLFQSIFSTVWTPYIFRAIEANAPPARLSATAESAAALLASALCLTGIFSPLASLLLPENYAAVRFIVVSCMLPPLFCTLVEISGIGLNVVRKTRPIALATLGALAANLLLLGLAVPSGGARGAAVACAASFWLFFVFKTESSCRLWQPLKRLPLYMHTLFCLASSAAYTCFGTPANYPLFAGVWAVYLAGCILRHRKDLHKLFHYLKKQGFPL

SEQ ID NO: 190 - protein, 473 aa, Neisseria
MDTKEILGYAAGSIGSAVLAVIILPLLSWYFPADDIGRIVLMQTAAGLTVSVLCLGLDQAYVREYYAAADKDTLFKTLFLPPLLFSAAIAALLLSRPSLPSEILFSLDDAAAGIGLVLFELSFLPIRFLLLVLRMEGRALAFSSAQLVPKLAILLLLPLTVGLLHFPANTSVLTAVYALANLAAAAFLLFQNRCRLKAVRRAPFSPAVLHRGLRYGIPLALSSLAYWGLASADRLFLKKYAGLEQLGVYSMGISFGGAALLLQSIFSTVWTPYIFRAIEENATPARLSATAESAAALLASALCLTGIFSPLASLLLPENYAAVRFTVVSCMLPPLFYTLTEISGIGLNVVRKTRPIALATLGALAANLLLLGLAVPSGGTRGAAVACAASFWLFFVFKTESSCRLWQPLKRLPLYMHTLFCLASSAAYTCFGTPANYPLFAGVWAAYLAGCILRHRKNLHKLFHYLKKQGFPL

SEQ ID NO: 191 - protein, 212 aa, Neisseria
  VARIANT (1)...(212): Xaa = Any Amino Acid
ILKPHNQLKEDIQPDPADQNALSEPDAATEAEQSDAENAADKQPVADKADEVEEKAGEPEREEPDGQAVRKKALTEEREQTVREKAQKKDAETVKIQAVKPSKETEKKASKEEKKAAKEKVAPKPTPEQILNSGSIEXARSAAAKEVQKMXNVRQGGSXRIICKWARMPTVRARKGSVPNWQSWAYLPRWSVIRRDIKRFTGCKAAICLPMR

SEQ ID NO: 192 - protein, 289 aa, Neisseria
MFMNKFSQSGKGLSGFFFGLILATVIIAGILFYLNQSGQNAFKIPASSKQPAETEILKPKNQPKEDIQPEPADQNALSEPDAATEAEQSDAEKAADKQPVADKADEVEEKAGEPEREEPDGQAVRKKALTEEREQTVREKAQKKDAETVKKQAVKPSKETEKKASKEEKKAAKEKVAPKPTPEQILNSGSIEKARSAAAKEVQKMKTSDKAEATHYLQMGAYADRQSAEGQRAKLAILGISSKVVGYQAGHKTLYRVQSGNMSADAVKKMQDELKKHEVASLIRSIESK

SEQ ID NO: 193 - protein, 289 aa, Neisseria
MFMNKFSQSGKGLSGFFFGLILATVIIAGILFYLNQSGQNAFKIPVPSKQPAETEILKPKNQPKEDIQPEPADQNALSEPDAAKEAEQSDAEKAADKQPVADKADEVEEKADEPEREKSDGQAVRKKALTEEREQTVGEKAQKKDAETVKKQAVKPSKETEKKASKEEKKAEKEKVAPKPTPEQILNSGSIEKARSAAAKEVQKMKTPDKAEATHYLQMGAYADRRSAEGQRAKLAILGISSKVVGYQAGHKTLYRVQSGNMSADAVKKMQDELKKHEVASLIRSIESK

SEQ ID NO: 194 - protein, 267 aa, Neisseria
MFMNKFSQSGKGLSGFFFGLILATVIIAGILLYLNQGGQNAFKIPAPSKQPAETEILKLKNQPKEDIQPEPADQNALSEPDVAKEAEQSDAEKAADKQPVADKADEVEEKAGEPEREEPDGQAVRKKALTEEREQTVREKAQKKDAETVKKKAVKPSKETEKKASKEEKKAAKEKVAPKPTPEQILNSRSIEKARSAAAKEVQKMKNFGQGGSQRIICKWARMPNPGARKGSVPNWQSWAYLPKWSAIRRDIKRFTACKAAICPPMR

SEQ ID NO: 195 - protein, 290 aa, Neisseria
MFMNKFSQSGKGLSGFFFGLILATVIIAGILLYLNQGGQNAFKIPAPSKQPAETEILKLKNQPKEDIQPEPADQNALSEPDVAKEAEQSDAEKAADKQPVADKADEVEEKAGEPEREEPDGQAVRKKALTEEREQTVREKAQKKDAETVKKQAVKPSKETEKKASKEEKKAAKEKVAPKPTPEQILNSRSIEKARSAAAKEVQKMKNFGQGGSQRIICKWARMPTVRSAEGQRAKLAILGISSEVVGYQAGHKTLYRVQSGNMSADAVKKMQDELKKHGVASLIRAIEGK

SEQ ID NO: 196 - protein, 222 aa, Neisseria
  VARIANT (1)...(222): Xaa = Any Amino Acid
MNHDITFLTLFLLGXFGGTHCIGMCGGLSSAFXXQLPPHINRFWLILLLNTGRVSSYTAIGLILGLIGQVGVSLDQTRVLQNILYTAANLLLLFLGLYLSGISSLAAKIEKIGKPIWRNLNPILNRLLPIKSIPACLAVGILWGWLPCGLVYSASLYALGSGSAATGGLYMLAFALGTLPNLLAIGIFSLQLXKIMQNRYIRLCTGLSVSLWALWKLAVLWL

SEQ ID NO: 197 - protein, 222 aa, Neisseria
MNHDITFLTLFLLGFFGGTHCIGMCGGLSSAFALQLPPHINRFWLILLLNTGRVSSYTAIGLILGLIGQVGVSLDQTRVLQNILYTAANLLLLFLGLYLSGISSLAAKIEKIGKPIWRNLNPILNRLLPIKSIPACLAVGILWGWLPCGLVYSASLYALGSGSAATGGLYMLAFALGTLPNLLAIGIFSLQLKKIMQNRYIRLCTGLSVSLWALWKLAVLWL

SEQ ID NO: 198 - protein, 222 aa, Neisseria
  VARIANT (1)...(222): Xaa = Any Amino Acid
MNXDITFLTLFLLGFFGGTHCIGMCGGLSSAFALQLPPHINRXWLILLLNTGRVSSYTAIGLILGLIGQVGVSLDQTRVXQNILYTAANLLLLFLGLYLSGISSLAAKIEKIGKPIWRNLNPILNRLLPIKSIPACLAVGILWGWLPCGLVYSASLYALGSGSAATGGLYMLAFALGTLPNLXAIGIFSLQLXKIMQNRYIRLCTGLSVSLWALWKLAVLWL

SEQ ID NO: 199 - protein, 222 aa, Neisseria
MNHDITFLTLFLLGFFGGTHCIGMCGGLSSAFALQLPPHINRFWLILLLNTGRISSYTAIGLMLGLIGQLGISLDQTRVLQNILYTASNLLLLFLGLYLSGISSLAAKIEKIGKPIWRNLNPILNRLLPIKSIPACLAVGILWGWLPCGLVYSASLYALGSGSATTGGLYMLAFALGTLPNLLAIGIFSLQLKKIMQNRYIRLCTGLSVSLWALWKLAVLWL

SEQ ID NO: 200 - protein, 277 aa, Neisseria
  VARIANT (1)...(277): Xaa = Any Amino Acid
MENQRPLLGFRLALLAAMTWGTLPXSVRQVLKFVDAPTLVWVRFTVAAAVLFVLLALGGRLPKRRDFSWCSFRLLLLGVAGISANFVLIAQGLHYISPTTTQVLWQISPFTMIVVGVLVFKDRMTAAQKIGLVLLLAGLLMYFNDKFGELSGLGAYXKGVLLCAAGSMAWVCNAVAQKLLSAQFGPQQILLLIYAASAAVFLPFAEPAHIGSMDGTLAWVCIAYCCLNTLIGYGSFGEALKHWEASKVSAVTTLLPVFTVINTLLGHYVMPETFAAP

SEQ ID NO: 201 - protein, 277 aa, Neisseria
  VARIANT (1)...(277): Xaa = Any Amino Acid
MENQRPLLGFALALLAAMTWGTLPIAVRQVLKFVDAPTLVWVRFTVAAAVLFVLLALGGRLPKRRDFSWCSFRLLLLGVAGISANFVLIAQGLHYISPTTTQVLWQISPFTMIVVGVLVFKDRMTAAQKIGLVLLLAGLLMFFNDKFGELSGLGAYAKGVLLCAAGSMAWVCYAVAQKLLSAQFGPQQILLLIYAASAAVFLPFAEPAHIGSLDGTLAWVCFAYCCLNTLIGYGSFGEALKHWEASKVSAVTTLLPVFTVIXXLLGHYVMPETFAAP

SEQ ID NO: 202 - protein, 307 aa, Neisseria
MENQRPLLGFALALLAAMTWGTLPIAVRQVLKFVDAPTLVWVRFTVAAAVLFVLLALGGRLPKWRDFSWCSFRLLLLGVAGISANFVLIAQGLHYISPTTTQVLWQISPFTMIVVGVLVFKDRMTAAQKIGLVLLLAGLLMFFNDKFGELSGLGAYAKGVLLCAAGSMAWVCYAVAQKLLSAQFGPQQILLLIYAASAAVFLPFAELAHIGSLDGTLAWVCFAYCCLNTLIGYGSFGEALKHWEASKVSAVTTLLPVFTVIFSLLGHYVMPDTFAAPDMNGLGYAGALVVVGGAVTAAVGDRLFKRR

SEQ ID NO: 203 - protein, 307 aa, Neisseria
  VARIANT (1)...(307): Xaa = Any Amino Acid
MENQRPLLGFALALLAAMTWGTLPIAVRQVLKFVDAPTLVWVRFTVAAAVLFVLLALGGRLPKRRDFSWHSFRLLLLGVTGISANFVLIAQGLHYISPTTTQVLWQISPFTMIVVGVLVFKDRMTAAQKIGLVLLLVGLLMFFNDKFGELSGLGAYAKGVLLCAAGSMAWVCYAVAQKLLSAQFGPQQILLLIYAASAAVFLLXAEPAHIGSLDGTLAWVCFVYCCLNTLIGYGSFGEALKHWEASKVSAVTTLLPVFTVIFSLLGHYVMPDTFAAPDMNGLGYVGALVVVGGAVTAAVGDRPFKRR

SEQ ID NO: 204 - protein, 307 aa, Neisseria
MENQRPLLGFALALLAAMTWGTLPIAVRQVLKFVDAPTLVWVRFTVAAAVLFVLLALGGRLPKRRDFSWHSFRLLLLGVTGISANFVLIAQGLHYISPTTTQVLWQISPFTMIVVGVLVFKDRMTAAQKIGLVLLLVGLLMFFNDKFGELSGLGAYAKGVLLCAAGSMAWVCYAVAQKLLSAQFGPQQILLLIYAASAAVFLPFAEPAHIGSLDGTLAWVCFVYCCLNTLIGYGSFGEALKHWEASKVSAVTTLLPVFTVIFSLLGHYVMPDTFAAPDMNGLGYVGALVVVGGAVTAAVGDRPFKRR

SEQ ID NO: 205 - protein, 312 aa, Neisseria
  VARIANT (1)...(312): Xaa = Any Amino Acid
MVARRAHNPKVVGSNPXPATXFQTPRFNAEXVLXLPVSCFLFPAASVFCRIFLPAAISERQTAVCLRLQIQAVWLQSSALSSRKPTMPTVRFTESVSKQDLDALFEWAKASYGAESCWKTLYLNGXPLGNLSPEWVERVXKDWEAGCXESSDGIFLNADGWPDMGGRLQHLALGWHCAGLLDGWRNECFDLTDGGGNPLFTLERAXXRPXGLLSRAVHLNGLTESDGRWHFWIGRRSPHKAVDPNKLDNTXAGGVSGGEMPSEAVCRESSEEAGLDKTLLPLIRPVSQLHSLRSVSRGVHNEILYVFDAVLP

SEQ ID NO: 206 - protein, 291 aa, Neisseria
MPTVRFTESVSKQDLDALFEWAKASYGAESCWKTLYLNGLPLGNLSPEWVERVKKDWEAGCSESSDGIFLNADGWPDMGGRLQHLALGWHCAGLLDGWRNECFDLTDGGGNPLFTLERAAFRPFGLLSRAVHLNGLTESDGRWHFWIGRRSPHKAVDPNKLDNTAAGGVSGGEMPSEAVCRESSEEAGLDKTLLPLIRPVSQLHSLRSVSRGVHNEILYVFDAVLPETFLPENQDGEVAGFEKMDIGGLLDAMLSGNMMHDAQLVTLDAFCRYGLIDAAHPLSEWLDGIRL

SEQ ID NO: 207 - protein, 291 aa, Neisseria
MPTVRFTESVSKHDLDALFEWAKASYGAESCWKTLYLNGLPLGNLSPEWAERVKKDWEAGCSESSDGIFLNADGWPDMGRRLQHLARIWKEAGLLHGWRDECFDLTDGGSNPLFALERAAFRPFGLLSRAVHLNGLVESDGRWHFWIGRRSPHKAVDPDKLDNTAAGGVSSGELPSETVCRESSEEAGLDKTLLPLIRPVSQLHSLRPVSRGVHNEILYVFDAVLPETFLPENQDGEVAGFEKMDIGGLLAAMLSGNMMHDAQLVTLDAFCRYGLIDAAHPLSEWLDGIRL

SEQ ID NO: 208 - protein, 372 aa, Neisseria
MVARRAHNPKVVGSNPAPATKYQTPRFNAEGVLFFLFPAASVFCRIFLPAAISERQAAVCLRLQIQAVWLQSSALCSRKPAMPTVRFTESVSKQDLDALFERAKASYGAESCWKTLYLNRLPLGNLSPEWAERIKKDWEAGCSESSNGIFLNADGWPDMGGRLQHLARTWNKAGLLHGWRNECFDLTDGGGNPLFTLERAAFRPFGLLIRAVHLNGLVESNGRWHFWIGRRSPHKAVDPGKLDNIAGGGVSGGEMPSEAVCRESSEEAGLDKTLFPLIRPVSRLHSLRPVSRGVHNEILYVFDAVLPETFLPENQDGEVAGFEKMDIGGLLDAMLSKNMMHDAQLVTLDAFYRYGLIDAAHPLSEWLDGIRL

SEQ ID NO: 209 - protein, 291 aa, Neisseria
MPTVRFTESVSKQDLDALFERAKASYGAESCWKTLYLNRLPLGNLSPEWAERIKKDWEAGCSESSDGIFLNADGWPDMGGRLQHLARTWNKAGLLHGWRNECFDLTDGGGNPLFTLERAAFRPFGLLSRAVHLNGLVESNGRWHFWIGRRSPHKAVDPGKLDNIAGGGVSGGEMPSEAVCRESSEEAGLDKTLFPLIRPVSRLHSLRPVSRGVHNEILYVFDAVLPETFLPENQDGEVAGFEKMDIGGLLDAMLSKNMMHDAQLVTLDAFYRYGLIDAAHPLSEWLDGIRL

SEQ ID NO: 210 - protein, 188 aa, Neisseria
  VARIANT (1)...(188): Xaa = Any Amino Acid
MNRPKQPFFRPEVAVARQTSLTGKVILTRPLSFSLWTTFASISALLIILFLIFGNYTRKTTVEGQILPASGVIRVYAPDTXTITAKFVEDGXKVKAGDKLFALSTSRFGAGGSVQQQLKTEAVLKKTLAEQELGRLKLIHGNETRSLKATVERLENQELHISQQIDGQKRRIRLAEEMLQKYRFLSXQ

SEQ ID NO: 211 - protein, 238 aa, Neisseria
  VARIANT (1)...(238): Xaa = Any Amino Acid
MNRPKQPFFRPEVAVARQTSLTGKVILTRPLSFSLWTTFASISALLIILFLIFGNYTRKTTVEGQILPASGVIRVYAPDTGTITAKFXEDGEKVKAGDKLFALSTSRFGAGDSVQQQLKTEAVLKKTLAEQELGRLKLIHGNETRSLKATVERLENQELHISQQIDGQKRRIRLAEEMLQKYRFLSANDAVPKQEMMNVKAELLEQKAKLDAYRREEVGLLQEIRTQNLTLXSLPQAA

SEQ ID NO: 212 - protein, 188 aa, Neisseria
MNRPKQPFFRPEVAIARQTSLTGKVILTRPLSFSLWTTFASISALLIILFLIFGNYTRKTTMEGQILPASGVIRVYAPDTGTITAKFVEDGEKVKAGDKLFALSTSRFGAGGSVQQQLKTEAVLKKTLAEQELGRLKLIHENETRSLKATVERLENQKLHISQQIDGQKRRIRLAEEMLRKYRFLSAQ

SEQ ID NO: 213 - protein, 181 aa, Neisseria
  VARIANT (1)...(181): Xaa = Any Amino Acid
MLNTFFAVLGGCLLXLPCGKSVNTAVQPQNAVQSAPKPVFKVIYIDNTAIAGLDLGQSSEGKTNDGKKQISYPIKGLPEQNVIRLIGKHPGDLEAVSGKCMETDDKDSPAGWAENGVCHTLFAKLVGNIAEDGGKLTDYLVSHAALQPYQAGKSGYAAVQNGRYVLEIDSEGAFYFRRRHY

SEQ ID NO: 214 - protein, 181 aa, Neisseria
MLKTSFAVLGGCLLLAACGKSENTAEQPQNAVQSAPKPVFKVKYIDNTAIAGLDLGQSSEGKTNDGKKQISYPIKGLPEQNVIRLIGKHPGDLEAVSGKCMETDDKDSPAGWAENGVCHTLFAKLVGNIAEDGGKLTDYLVSHAALQPYQAGKSGYAAVQNGRYVLEIDSEGAFYFRRRHY

SEQ ID NO: 215 - protein, 181 aa, Neisseria
MLKIPFAVLGGCLLLAACGKSENTAEQPQNAAQSAPKPVFKVKYIDNTAIAGLALGQSSEGKTNDGKKQISYPIKGLPEQNAVRLTGKHPNDLEAVVGKCMETDGKDAPSGWAENGVCHTLFAKLVGNIAEDGGKLTDYLISHSALQPYQAGKSGYAAVQNGRYVLEIDSEGAFYFRRRHY

SEQ ID NO: 216 - protein, 231 aa, Neisseria
  VARIANT (1)...(231): Xaa = Any Amino Acid
MEDLYIILALGLVAMIAGFIDAIAGGGGLITLPALLLAGIPPVSAIATNKLQAAAATFSATVSFARKGLIDWKKGLPIAAASFVGGVAGALSVSLVSKDILLAVVPVLLIFVALYFVFSPKLDGSKEGKARMSFFLFGLTVXTAFGFLRRCVRTGCRLVFSDCLYCFARLQAVERDVLHQIGERCLQSWFAIGIPAARFDYFPDCGNDGGRCVCRCEFRCEICRTLRFEAD

SEQ ID NO: 217 - protein, 262 aa, Neisseria
MEDLYIILALGLVAMIAGFIDAIAGGGGLITLPALLLAGIPPVSAIATNKLQAAAATFSATVSFARKGLIDWKKGLPIAAASFVGGVAGALSVSLVSKDILLAVVPVLLIFVALYFVFSPKLDGSKEGKARMSFFLFGLTVAPLLGFYDGVFGPGVGSFFLIAFIVLLGCKLLNAMSYTKLANVACNLGSLSVFLLHGSIIFPIAATMAVGAFVGANLGARFAVRFGSKLIKPLLIVISISMAVKLLIDERNPLYQMIVSMF

SEQ ID NO: 218 - protein, 262 aa, Neisseria
MEDLYIILALGLVAMIAGFIDAIAGGGGLITLPALLLAGIPPVSAIATNKLQAAAATFSATVSFARKGLIDWKKGLPIAAASFAGGVVGALSVSLVSKDILLAVVPVLLIFVALYFVFSPKLDGSKEGKARMSFFLFGLTVAPLLGFYDGVFGPGVGSFFLIAFIVLLGCKLLNAMSYTKLANVACNLGSLSVFLLHGSIIFPIAATMAVGAFVGANLGARFAVRFGSKLIKPLLIVISISMAVKLLIDERNPLYQMIVSMF

SEQ ID NO: 219 - protein, 231 aa, Neisseria
MEDLYIILALGLVAMIAGFIDAIAGGGGLITLPALLLAGIPPVSAIATNKLQAAAATFSATVSFARKGLIDWKKGLPIAAASFAGGVVGALSVSLVSKDILLAVVPVLLIFVALYFVFSPKLDGSKEGKARMSFFLFGLTVATAFGFLRRCVRTGCRLVFSDCLYCFARLQAVERDVLHQIGERCLQSWFAIGIPAARFDYFPDCGNDGGRCVCRCEFRCEICRPLRFEAD

SEQ ID NO: 220 - protein, 262 aa, Neisseria
MEDLYIILALGLVAMIAGFIDAIAGGGGLITLPALLLAGIPPVSAIATNKLQAAAATFSATVSFARKGLIDWKKGLPIAAASFAGGVVGALSVSLVSKDILLAVVPVLLIFVALYFVFSPKLDGSKEGKARMSFFLFGLTVAPLLGFYDGVFGPGVGSFFLIAFIVLLGCKLLNAMSYTKLANVACNLGSLSVFLLHGSIIFPIVATMAVGAFVGANLGARFAVRFGSKLIKPLLIVISISMAVKLLIDERNPLYQMIVSMF

SEQ ID NO: 221 - protein, 210 aa, Neisseria
  VARIANT (1)...(210): Xaa = Any Amino Acid
LLGIASVIGTLLQQNQPQTDYLVKFGSFWAXIFGFLGLYDVYASAWFVVIMMFLVVSTSLCLIRNVPPFWREMKSFREKVKEKSLAAMRHSSLLDVKIAPEVAKRYLEVQGFQGKTINREDGSVLIAAKKGTMNKWGYIFAHVALIVICLGGLIDSNLLLKLGMLTGRIFRTIRRFMPRIXKPESXFGCVQSLIGQRQYFXRGRVRMWFS

SEQ ID NO: 222 - protein, 241 aa, Neisseria
  VARIANT (1)...(241): Xaa = Any Amino Acid
MSKSRISPTLLSRPWFAFFSSMRFAVALLSLLGIASVIGTVLQQNQPQTDYLVKFGPFWTRIFDFLGLYDVYASAWFVVIMMFLVVSTSLCLIRNVPPFWREMKSFREKVKEKSLAAMRHSSLLDVKIAPEVAKRYLEVRGFQGKTVSREDGSVLIAAKKGTMNKWGYIXAHVALIVICLGRLINXNLLLKLGMLAGSIFRNNRRVMPRISKPESIWGGVQSLIKGQRQYFQRGKVRMWFS

SEQ ID NO: 223 - protein, 351 aa, Neisseria
MPSETRLPNFIRVLIFALGFIFLNACSEQTAQTVTLQGETMGTTYTVKYLSNNRDKLPSPAEIQKRIDDALKEVNRQMSTYQPDSEISRFNQHTAGKPLRISSDFAHVTAEAVRLNRLTHGALDVTVGPLVNLWGFGPDKSVTREPSPEQIKQAASYTGIDKIILKQGKDYASLSKTHPKAYLDLSSIAKGFGVDKVAGELEKYGIQNYLVEIGGELHGKGKNARGEPWRIGIEQPNIVQGGNTQIIVPLNNRSLATSGDYRIFHVDKNGKRLSHIINPNNKRPISHNLASISVVADSAMTADGLSTGLFVLGETEALKLAEREKLAVFLIVRDKGGYRTAMSSEFEKLLR

SEQ ID NO: 224 - protein, 351 aa, Neisseria
  VARIANT (1)...(351): Xaa = Any Amino Acid
MPSETRLPNFIRTLIFALSFIFLNACSEQTAQTVTLQGETMGTTYTVKYLSNNRDXLPSPAEIQXRIDDALKEVNRQMSTYQPDSEISRFNQHTAGKPLRISSDFAHVTAEAVHLNRLTHGALDVTVGPLVNLWGFGPDKSVTREPSPEQIKQAASYTGIDKIILKQGKDYASLSKTHPKAYLDLSSIAKGFGVDXVAGELEKYGIQNYLVEIGGELHGKXKNARGEPWRIGIEQPNIVQGGNTQIIVPLNNRSXATSGDYRIFHVDKSGKRLSHIINPNNKRPISHNLASISVXADSAMTADGXSTGLFVLGETEALKLAEREKLAVFLIVRDKGGYRTAMSSEFEKLLR

SEQ ID NO: 225 - protein, 351 aa, Neisseria
MPSETRLPNLIRALIFALGFIFLNACSEQTAQTVTLQGETMGTTYTVKYLSNNRDKLPSPAKIQKRIDDALKEVNRQMSTYQTDSEISRFNQHTAGKPLRISSDFAHVTAEAVRLNRLTHGALDVTVGPLVNLWGFGPDKSVTREPSPEQIKQAASYTGIDKIILQQGKDYASLSKTHPKAYLDLSSIAKGFGVDKVAGELEKYGIQNYLVEIGGELHGKGKNAHGEPWRIGIEQPNIIQGGNTQIIVPLNNRSLATSGDYRIFHVDKNGKRLSHIINPNNKRPISHNLASISVVSDSAMTADGLSTGLFVLGETEALRLAEQEKLAVFLIVRDKDGYRTAMSSEFAKLLR

SEQ ID NO: 226 - protein, 263 aa, Neisseria
  VARIANT (1)...(263): Xaa = Any Amino Acid
PCRRQGDDVYAAHASRQKLWLRFIGGRSHQNIRGGAAADGWRKGVQIGGEVFVRQNEGSXLAIGVMGGRAGQHASVNGKGGAAGSDLYGYGGGVYAAWHQLRDKQTGAYLDGWLQYQRFKHRINDENRAERYKTKGWTASVEGGYNALVAEGIVGKGNNVRFYLQPQAQFTYLGVNGGFTDSEGTAVGLLGSGQWQSRAGIRAKTRFALRNGVNLQPFAAFNVLHRSKSFGVEMDGEKQTLAGRTALEGRFGIEAGWKGHMSA

SEQ ID NO: 227 - protein, 619 aa, Neisseria
MFRAQLGSNTRSTKIGDDADFSFSDKPKPGTSHYFSSGKTDQNSSEYGYDEINIQGKNYNSGILAVDNMPVVKKYITDTYGDNLKDAVKKQLQDLYKTRPEAWEENKKRTEEAYIEQLGPKFSILKQKNPDLINKLVEDSVLTPHSNTSQTSLNNIFNKKLHVKIENKSHVAGQVLELTKMTLKDSLWEPRRHSDIHMLETSDNARIRLNTKDEKLTVHKAYQGGADFLFGYDVRESDKPALTFEEKVSGQSGVVLERRPENLKTLDGRKLIAAEKADSNSFAFKQNYRQGLYELLLKQCEGGFCLGVQRLAIPEAEAVLYAQQAYAANTLFGLRAADRGDDVYAADPSRQKLWLRFIGGRSHQNIRGGAAADGRRKGVQIGGEVFVRQNEGSRLAIGVMGGRAGQHASVNGKGGAAGSYLHGYGGGVYAAWHQLRDKQTGAYLDGWLQYQRFKHRINDENRAERYKTKGWTASVEGGYNALVAEGVVGKGNNVRFYLQPQAQFTYLGVNGGFTDSEGTAVGLLGSGQWQSRAGIRAKTRFALRNGVNLQPFAAFNVLHRSKSFGVEMDGEKQTLAGRTALEGRFGIEAGWKGHMSARIGYGKRTDGDKEAALSLKWLF

SEQ ID NO: 228 - protein, 627 aa, Neisseria
KKLRDRNSEYWKEETYHIKSNGRTYPNIPALFPKHPFDPFENINNSKKISFYDKEYTEDYLVGFARGFGVEKRNGEEEKPLRQYFKDCVNTENSNNDNCKISSFGNYGPILIKSDIFALASQIKNSHINSEILSVGNYIEWLRPTLNKLTGWQEHLYAGLDPFHYIEVTDNSHVIGQTIDLGALELTNSLWKPRWNSNIDYLITKNAEIRFNTKNESLLVKEDYAGGARFRFAYDLKDKVPEIPVLTFEKNITGTSDIIFEGKALDNLKHLDGHQIVKVNDTADKDAFRLSSKYRKGIYTLSLQQRPEGFFTKVQERDDIAIYAQQAQAANTLFALRLNDKNSDIFDRTLPRKGLWLRVIDGHSNQWVQGKTAPVEGYRKGVQLGGEVFTWQNESNQLSIGLMGGQAEQRSTFRNPDTDNLTTGNVKGFGAGVYATWHQLQDKQTGAYVDSWMQYQRFRHRINTEYATERFTSKGITASIEAGYNALLAEHFTKKGNSLRVYLQPQAQLTYLGVNGKFSDSENAQVNLLGSRQLQSRVGVQAKAQFAFTNGVTFQPFVAVNSIYQQKPFGVEIDGDRRVINNKTVIETQLGVAAKIKSHLTLQASFNRQTSKHHHAKQGALNLQWTF

SEQ ID NO: 229 - protein, 127 aa, Neisseria
  VARIANT (1)...(127): Xaa = Any Amino Acid
AEYVQFSIDLFSVGKSGGGIPKAKPVFDAKPRWEVDRKLNKLTTREQVEKNVQETRRRSQSSQFKAHAQREWENKTGLDFNHFIGGDINKKGTVTGGHSLTRGDVRVIQQTSAPDKHGXLSSDSGNX

SEQ ID NO: 230 - protein, 227 aa, Neisseria
  VARIANT (1)...(227): Xaa = Any Amino Acid
AVCLPMHAHASXLANDSFIRQVLDRQHFEPDGKYHLFGSRGELAERQSHIGLGKIQSHQLGNLMIQQAAIKGNIGYIVRFSDHGHEVHSPFDNHASHSDSDEAGSPVDGFSLYRIHWDGYEHHPADGYDGPQGGGYPAPKGARDIYSYDIKGVAQNIRLNLTDNRSTGQRLADRFHNAGSMLTQGVGDGFKRATRYSPELDRSGNAAEAFNGTADIVKNIIGAAGEI

SEQ ID NO: 231 - protein, 298 aa, Neisseria
  VARIANT (1)...(298): Xaa = Any Amino Acid
RRLKHCCHARLGSAFHRKQDGAHQRFGRYGATQRLCRSSHPRLGSPKPQCRTRHRSRQQYLYGSHPHQRDWSCPGKIQLGRHHGTSCRAVADXRDRICEREIRRQRQXCRCRLGKIPSLSIPKYPLKLEQRYGKENITSSTVPPSNGKNVKLADQRHPKTGVPFDGKGFPNFEKHVKYDTKLDIQELSGGGIPKAKPVFDAKPRWEVDRKLNKLTTREQVEKNVQETRRRSQSSQFKAHAQREWENKTGLDFNHFIGGDINKKGAVTGGHSLTRGDVRVIQQTSAPDKHGVLSSDSGN

SEQ ID NO: 232 - protein, 628 aa, Neisseria
  VARIANT (1)...(628): Xaa = Any Amino Acid
LGISRKISLILSILAVCLPMHAHASDLANDPFIRQVLDRQHFEPDGKYHLFGSRGELAXRNGHIGLGNIQSHQLGHLMIQQAAVEGNIGYIVRFSDHGHKFHSPFDNHASHSDSDEAGSPVDGFSLYRIHWDGYEHHPADGYDGPQGGGYPAPKGARDIYSYDIKGVAQNIRLNLTDNRSTGQRLADRFHNAGAMLTQGVGDGFKRATRYSPELDRSGNAAEAFNGTADIVKNIIGAAGEIVGAGDAVQGISEGSNIAVMHGLGLLSTENKMARINDLADMAQLKDYAAAAIRDWAVQNPNAAQGIEAVSNIFMAAIPIKGIGAVRGKYGLGGITAHPVKRSQMGAIALPKGKSAVSDNFADAAYAKYPSPYHSRNIRSNLEQRYGKENITSSTVPPSNGKNVKLADQRHPKTGVPFDGKGFPNFEKHVKYDTKLDIQELSGGGIPKAKPVFDAKPRWEVDRKLNKLTTREQVEKNVQETRRRSQSSQFKAHAQREWENKTGLDFNHFIGGDINKKGTVTGGHSLTRGDVRVIQQTSAPDKHGVYQATVEIKKPDGSWEVKTKKGGKVMTKHTMFPKDWDEARIRAEVTSAWESRIMLKDNKWQGTSKSGIKIEGFTEPNRTAYPIYE

SEQ ID NO: 233 - protein, 556 aa, Neisseria
LGISRKISLILSILAVCLPMHAHASDLANDSFIRQVLDRQHFEPDGKYHLFGSRGELAERSGHIGLGNIQSHQLGNLFIQQAAIKGNIGYIVRFSDHGHEVHSPFDNHASHSDSDEAGSPVDGFSLYRIHWDGYEHHPADGYDGPQGGGYPAPKGARDIYSYDIKGVAQNIRLNLTDNRSTGQRLVDRFHNTGSMLTQGVGDGFKRATRYSPELDRSGNAAEAFNGTADIVKNIIGAAGEIVGAGDAVQGISEGSNIAVMHGLGLLSTENKMARINDLADMAQLKDYAAAAIRDWAVQNPNAAQGIEAVSNIFTAVIPVKGIGAVRGKYGLGGITAHPVKRSQMGEIALPKGKSAVSDNFADAAYAKYPSPYHSRNIRSNLEQRYGKENITSSTVPPSNGKNVKLANKRHPKTKVPFDGKGFPNFEKDVKYDTRINTAVPQVNPIDEPVFNPKGSVGSAHSWSITARIQYAKLPRQGRIRYIPPKNYSPSAPLPKGPNNGYLDKFGNEWTKGPSRTKGQEFEWDVQLSKTGREQLGWASRDGKHLNISIDGKITHK

SEQ ID NO: 234 - protein, 119 aa, Neisseria
MNIHTLLSKQWTLPPFLPKRLLLSLLILLAPNAVFWVLALLTATARPIVNLDYLPAALLIALPWRFVKIAGVLAFWLAVLFDGLMMVIQLFPFMDLIGAINLVPFILTAPAPYQIMTGL

SEQ ID NO: 235 - protein, 472 aa, Neisseria
MNIHTLLSKQWTLPPFLPKRLLLSLLILLAPNAVFWVLALLTATARPIVNLDYLPAALLIALPWRFVKIAGVLAFWLAVLFDGLMMVIQLFPFMDLIGAINLVPFILTAPAPYQIMTGLLLLYMLAMPFVLQKAAAKTDFRHIAVCAAVVAAAGYFTGHLSYYDRGRMANIFGANNFYYAKSQAMLYTVSQNADFITAGLVDPVFLPLGNQQRAATHLNEPKSQKILFIVAESWGLPANPELQNATFAKLLAQKDRFSVWESGSFPFIGATVEGEMRELCAYGGLRGFALRRAPDEKFARCLPNRLKQEGYATFAMHGAGSSLYDRFSWYPRAGFQEIKTAENLIGKKTCAIFGGVCDSELFGEVSAFFKKHDKGLFYWMTLTSHADYPESDIFNHRLKCTEYGLPAETDLCRNFSLHTQFFDQLADLIQRPEMKGTEVIIVGDHPPPVGNLNETFRYLKQGHVAWLNFKIK

SEQ ID NO: 236 - protein, 472 aa, Neisseria
  VARIANT (1)...(472): Xaa = Any Amino Acid
MNIHTLLSKQWTLPPFLPKRLLLSLLILLXPNAVFWVLALLTATARPIVNLXYLPAALLIALPWRXVKIXGVLAXWLAVLFDGLMMVIQLFPFMDLIGAINLVPFIXTAPALYQIMTGLLLLYMLAMPFVLQKAAAKTDFRHIAACAAVVVAAGYFTGHLSXYDRGRMANIFGANNFYYAKSQAMLYTVSQNADFITAGLVDPVFLPLGNQQRAATHLNEPKSQKILFIVAESWGLPANPELQNATFAKLLAQKXRFSVWESGSFPFIGATIEGEMRELCAYGGLRGFALRRAPDEKFARCLPNRLKQEGYATFAMHGAGSSLYDRFSWYPRAGFQEIKTAENLIGKKTCAIFGGVCDSELFGEVSAXFKKHDKGLFYWMTLTSHADYPESDIFNHRLKCTEYGLPAETDXCRNFSLHTQFFDQLADLIQRPEMKGTEVIIVGDHPPPVGNLNETFRYLKQGHVXWLNFKIK

SEQ ID NO: 237 - protein, 209 aa, Neisseria
MNIHALLSEQWTLPPFLPKRLLLSLLILLAPNAVFWVLALLTATARPIVNLDYLPAALLIALPWRFVKIAGVLAFWPAVLFDGLMMVIQLFPFMDLIGAINLVPFILTAPAPYQIMTGLLLLYMLAMPFVLQKAAVKTDFRHIAVCAAVVAAARYFTGPFELLRTGGRWQYVQHRRLLLSGSRASFRRRQKADVLRRLGNPYASMGNGG

SEQ ID NO: 238 - protein, 472 aa, Neisseria
MNIHALLSEQWTLPPFLPKRLLLSLLILLAPNAVFWVLALLTATARPIVNLDYLPAALLIALPWRFVKIAGVLAFWPAVLFDGLMMVIQLFPFMDLIGAINLVPFILTAPAPYQIMTGLLLLYMLAMPFVLQKAAVKTDFRHIAVCAAVVAAAGYFTGHLSYYDRGRMANIFGANNFYYAKSQAMLYTVSQNADFITAGLVDPVFLPLGNQQRAATRLSEPKSQKILFIVAESWGLPGNPELQNATFAKLLAQKDRFSVWESGSFPFIGATVEGEMRELCAYGGLRGFALRRAPDEKFARCLPNRLKQEGYATFAMHGAGSSLYDRFSWYPRAGFQKIKTAENLIGKKTCAIFGGVCDSELFGEVSAFFKKHDKGLFYWMTLTSHADYPESDIFNHRLKCTEYGLPAETDLCRNFSLHTQFFDQLADLIRRPEMKGTEVIIVGDHPPPVGNLNETFRYLKQGHVAWLHFKIK

SEQ ID NO: 239 - protein, 139 aa, Neisseria
  VARIANT (1)...(139): Xaa = Any Amino Acid
VSGRYRALDRVSKIIIVTLSIATLAAAGIAMSRGMQMQSDFIEPTPWTLAGLGFLIALMGWMPAPIEISAINSLWVTEKQRINPSEYRDGIFEFNVGYIASAVLALVFLALGXVAPNGNGXTVQMAGGKYNGQLINMYA

SEQ ID NO: 240 - protein, 417 aa, Neisseria
MSEQHISTWKSKINALGPGIMMASAAVGGSHLIASTQAGALYGWQIALIIILTNLFKYPFFRFSAHYTLDTGKSLIEGYAEKSRVYLWVFLILCILSATINAGAVAIVTAAIVKMAIPSLMFDAGTVAALIMASCLIILVSGRYRALDRVSKIIIVTLSIATLAAAGIAMSRGMQMQSDFIEPTPWTLAGLGFLIALMGWMPAPIEISAINSLWVTEKQRINPSEYRDGIFDFNVGYIASAVLALVFLALGAFVQYGNGEAVQMAGGKYIGQLINMYAVTIGGWSRPLVAFIAFACMYGTTITVVDGYARAIAEPVRLLRGKDKTGNAEFFAWNIWVAGSGLAVIFWFDGVMANLLKFAMIAAFVSAPVFAWLNYRLVKGDEKHKLTSGMNALALAGLIYLTGFTVLFLLNLAGMFK

SEQ ID NO: 241 - protein, 417 aa, Neisseria; identical to SEQ ID NO: 240

SEQ ID NO: 242 - protein, 269 aa, Neisseria
MPKKSCVYLWVFLILCIASATINAGAVAIVTAAIVKMAIPSLMFDAGTVAALIMASCLIILVSGRYRALDRVSKIIIVTLSIATLAAAGIAMSRGMQMQPDFIEPTPWTLAGLGFLIALMGWMPAPIEISAINSLWVTEKQRINPSEYRDGIFDFNVGYIASAVLALVFLALGAFVQYGNGEAVQMGGGKYIGQLINMYAVTIGGGSRPLVAFIAFACMYGAASTVVDGYARAIAEPVRLLRGKDKTARPIVLLEKLGGRHRFGRDFLV

SEQ ID NO: 243 - protein, 337 aa, Neisseria
KKSCVYLWVFLILCIASATINAGAVAIVTAAIVKMAIPSLMFDAGTVAALIMASCLIILVSGRYRALDRVSKIIIVTLSIATLAAAGIAMSRGMQMQPDFIEPTPWTLAGLGFLIALMGWMPAPIEISAINSLWVTEKQRINPSEYRDGIFDFNVGYIASAVLALVFLALGAFVQYGNGEAVQMAGGKYIGQLINMYAVTIGGWSRPLVAFIAFACMYGTTITVVDGYARAIAEPVRLLRGRDKTGNAELFAWNIWVAGSGLAVIFWFDGAMAELLKFAMIAAFVSAPVFAWLNYRLVKGDKRHRLTAGMNALAIVGLLYLAGFAVLFLLNLTGLLA

SEQ ID NO: 244 - protein, 103 aa, Neisseria
LRETAYVLDSFDRYFVVALAGLFFVRAQSEREWMREVSAWQEKKGEKQAELPEIKDGMPDFPELALMLFHAVKTAVYWLFVGVVRFCRNYLAHESEPDRPVPP

SEQ ID NO: 245 - protein, 1014 aa, Neisseria
MFWIVLIVILLLALAGLFFVRAQSEREWMREVSAWQEKKGEKQAELPEIKDGMPDFPELALMLFHAVKTAVYWLFVGVVRFCRNYLAHESEPDRPVPPASANRADVPTASDGYSDSGNGTEEAETEEAEAAEEEAADTEDIATAVIDNRRIPFDRSIAEGLMPSESEISPVRPVFKEITLEEATRALNSAALRETKKRYIDAFEKNETAVPKVRVSDTPMEGLQIIGLDDPVLQRTYSHMFDADKEAFSESADYGFEPYFEKQHPSAFSAVKAENARNAPFHRHAGQGKGQAEAKSPDVSQGQSVSDGTAVRDARRRVSVNLKEPNKATVSAEARISRLIPESQTVVGKRDVEMPSETENVFTETVSSVGYGGPVYDETADIHIEEPAAPDAWVVEPPEVPKVPMTAIDIQPPPPVSEIYNRTYEPPSGFEQVQRSRIAETDHLADDVLNGGWQEETAAIADDGSEGAAERSSGQYLSETEAFGHDSQAVCPFENVPSERPSCRVSDTEADEGAFPSEETGAVSEHLPTTDLLLPPLFNPEATQTEEELLENSITIEEKLAEFKVKVKVVDSYSGPVITRYEIEPDVGVRGNSVLNLEKDLARSLGVASIRVVETIPGKTCMGLELPNPKRQMIRLSEIFNSPEFAESKSKLTLALGQDITGQPVVTDLGKAPHLLVAGTTGSGKSVGVNAMILSMLFKAAPEDVRMIMIDPKMLELSIYEGIPHLLAPVVTDMKLAANALNWCVNEMEKRYRLMSFMGVRNLAGFNQKIAEAAARGEKIGNPFSLTPDDPEPLEKLPFIVVVVDEFADLMMTAGKKIEELIARLAQKARAAGIHLILATQRPSVDVITGLIKANIPTRIAFQVSSKIDSRTILDQMGAENLLGQGDMLFLLPGTAYPQRVHGAFASDEEVHRVVEYLKQFGEPDYVDDILSGGGSEELPGIGRSGDDETDPMYDEAVSVVLKTRKASISGVQRALRIGYNRAARLIDQMEAEGIVSAPEHNGNRTILVPLDNA

SEQ ID NO: 246 - protein, 1014 aa, Neisseria
  VARIANT (1)...(1014): Xaa = Any Amino Acid
MFWIVLIVILLLALAGLFFVRAQSEREWMREVSAWQEKKGEKQAELPEIKDGMPDFPELALMLFHAVKTAVYWLFVGVVRFCRNYLAHESEPDRPVPPASANRADVPTASDGYSDSGNGTEEAETEEAEAAEEEAADTEDIATAVIDNRRIPFDRSIAEGLMPSESEISPVRPVFKEITLEEATRALNSAALRETKKRYIDAFEKNETAVPKVRVSDTPMEGLQIIGLDDPVLQRTYSRMFDADKEAFSESADYGFEPYFEKQHPSAFSAVKAENARNAPFRRHAGQGKGQAEAKSPDVSQGQSVSDGTAVRDAXRRVSVNLKEPNKATVSAEARISRLIPESRTVVGKRDVEMPSETENVFTEXVSSVGYGXPVYDETADIHIEEPAAPDAWVVEPPEVPKVPMPAXDIPPPPPVSEIYNRTYEPPAGFEQVQRSRIAETDHLADDVLNGGWQEETAAIANDGSEGVAERSSGQYLSETEAFGHDSQAVCPFENVPSERPSRRAXDTEADEGAFQSEETGAVSEHLPTTDLLLPPLFNPGATQTEEXLLXNSITIEEKXAEFKVKVKVVDSYSGPVITRYEIEPDVGVRGNSVLNLEKXLARSLGVASIRVVETILGKTCMGLELPNPKRQMIRLSEIFNSPEFAESKSKLTLALGQDITGQPVVTDLGKAPHLLVAGTTGSGKSVGVNAMILSMLFKAAPEDVRMIMIDPKMLELSIYEGIPHLLAPVVTDMKLAANALNWCVNEMEKRYRLMSFMGVRNLAGXNQKIAEAAARGEKIGNPFSLTPDNPEPLXKLPFIVVVVDEFADLMMTAGKKIEELIARLAQKARAAGIHLILATQRPSVDVITGLIKANIPTRIAFQVSSKIDSRTILDQMGAENLLGQGDMLFLPPGTAYPQRVHGAFASDEEVHRVVEYLKQFGEPDYVDDXLSGGMSDDLLGISRSGDGETDPMYDEAVSVVLKTRKASISGVQRALRIGYNRAARLIDQMEAEGIVSAPEHNGNRTILVPXDNA

SEQ ID NO: 247 - protein, 925 aa, Neisseria
SEPDRPVPPASANRADVPTASDGYSDSGNGTEEAETEAAEAAEEEAADTEDIATAVIDNRRIPFDRSIAEGLMQSESKTSPVRPVFKEITLEEATRALSSAALRETKKRYIDAFEKNGTAVPKVRVSDTPMEGLQIIGLDDPVLQRTYSRMFDADKEAFSESADYGFEPYFEKQHPSAFSAVKAENARNAPFRRHAGQEKGQAEAKSPDVSQGQSVSDGTAVRDARRRVSVNLKEPNKATVSAEARISRLIPESRTVVGKRDVEMPSETENVFTETVSSVGYGGPVYDEAADIHIEEPAAPDAWVVEPPEVPEVAVPEIDILPPPPVSEIYNRTYEPPAGFEQAQRSRIAETDHLAADVLNGGWQEETAAIADDGSEGAAERSSGQYLSETEAFGHDSQAVCPFEDVPSERPSCRVSDTEADEGAFQSEETGAVSEHLPTTDLLLPPLFNPEATQTEEELLENSITIEEKLAEFKVKVKVVDSYSGPVITRYEIEPDVGVRGNSVLNLEKDLARSLGVASIRVVETIPGKTCMGLELPNPKRQMIRLSEIFNSPEFAESKSKLTLALGQDITGQPVVTDLGKAPHLLVAGTTGSGKSVGVNAMILSMLFKAAPEDVRMIMIDPKMLELSIYEGITHLLAPVVTDMKLAANALNWCVNEMEKRYRLMSFMGVRNLAGFNQKIAEAAARGEKIGNPFSLTPDDPEPLEKLPFIVVVVDEFADLMMTAGKKIEELIARLAQKARAAGIHLILATQRPSVDVITGLIKANIPTRIAFQVSSKIDSRTILDQMGAENLLGQGDMLFLPPGTAYPQRVHGAFASDEEVHRVVEYLKQFGEPDYVDDILSGGGSEELPGIGRSGDGETDPMYDEAVSVVLKTRKASISGVQRALRIGYNRAARLIDQMEAEGIVSAPEHNGNRTILVPLDNA

SEQ ID NO: 248 - protein, 1014 aa, Neisseria
MFWIVLIVIVLLALAGLFFVRAQSEREWMREVSAWQEKKGEKQAELPEIKDGMPDFPEFSLMLFHAVKTAVYWLFVGVVRFCRNYLAHESEPDRPVPPASANRADVPTASDGYSDSGNGTEEAETEAAEAAEEEAADTEDIATAVIDNRRIPFDRSIAEGLMQSESKTSPVRPVFKEITLEEATRALSSAALRETKKRYIDAFEKNGTAVPKVRVSDTPMEGLQIIGLDDPVLQRTYSRMFDADKEAFSESADYGFEPYFEKQHPSAFSAVKAENARNAPFRRHAGQEKGQAEAKSPDVSQGQSVSDGTAVRDARRRVSVNLKEPNKATVSAEARISRLIPESRTVVGKRDVEMPSETENVFTETVSSVGYGGPVYDEAADIHIEEPAAPDAWVVEPPEVPEVAVPEIDILPPPPVSEIYNRTYEPPAGFEQAQRSRIAETDHLAADVLNGGWQEETAAIADDGSEGAAERSSGQYLSETEAFGHDSQAVCPFEDVPSERPSCRVSDTEADEGAFQSEETGAVSEHLPTTDLLLPPLFNPEATQTEEELLENSITIEEKLAEFKVKVKVVDSYSGPVITRYEIEPDVGVRGNSVLNLEKDLARSLGVASIRVVETIPGKTCMGLELPNPKRQMIRLSEIFNSPEFAESKSKLTLALGQDITGQPVVTDLGKAPHLLVAGTTGSGKSVGVNAMILSMLFKAAPEDVRMIMIDPKMLELSIYEGITHLLAPVVTDMKLAANALNWCVNEMEKRYRLMSFMGVRNLAGFNQKIAEAAARGEKIGNPFSLTPDDPEPLEKLPFIVVVVDEFADLMMTAGKKIEELIARLAQKARAAGIHLILATQRPSVDVITGLIKANIPTRIAFQVSSKIDSRTILDQMGAENLLGQGDMLFLPPGTAYPQRVHGAFASDEEVHRVVEYLKQFGEPDYVDDILSGGGSEELPGIGRSGDGETDPMYDEAVSVVLKTRKASISGVQRALRIGYNRAARLIDQMEAEGIVSAPEHNGNRTILVPLDNA

SEQ ID NO: 249 - protein, 373 aa, Neisseria
  VARIANT (1)...(373): Xaa = Any Amino Acid
MIYQRNLIKELSFTAVGIFVVLLAVLVSTQAINLLGRAADGXVIAIDAVLALVGFWVXXXXXXXXXXXXXXXXXXXXXXXXXXXXXXXXXXXXXXXXXXXXXXXXXXXXXXXXXXXXXXXXXXXXXXXXXXXXXXXXXXXXXXXXXXXXXXXXXXXXXXXXXXXXXXXXXXXXXXXXXXXXXXXXXXXXXXXXXXXXXXXXXXXXXXXXXXXXXXXXXXXXXXXXXXXXXXXXXXXXXXXXXXXXXXXXXXXXXXXXXXXXXXXXXXXXXXXXXXXXXXXXXXXXXXXXXXXXXXXXXXXXXXIAIGLFLIYQNGLTLLFEAVEDGKIHFWLGLLPMHIIMFVLALILLRVRSMPSQPFWQAVGKSLTLKGGK

SEQ ID NO: 250 - protein, 371 aa, Neisseria
MIYQRNLIKELSFTAVGIFVVLLAVLVSTQAINLLGRAADGRVAIDAVLALVGFWVIGMTPLLLVLTAFISTLTVLTRYWRDSEMSVWLSCGLALKQWIRPVMQFAVPFAVLVAVMQLWVIPWAELRSREYAEILKQKQELSLVEAGEFNSLGKRNGRVYFVETFDTESGIMKNLFLREQDKNGGDNIIFAKEGNFSLNDNKRTLELRHGYRYSGTPGRADYNQVSFQKLNLIISTTPKLIDPVSHRRTIPTAQLIGSSNPQHQAELMWRISLTVSVLLLCLLAVPLSYFNPRSGHTYNILIAIGLFLIYQNGLTLLFEAVEDGKIHFWLGLLPMHIIMFAVALILLRVRSMPSQPFWQAVGKSLTLKGGK

SEQ ID NO: 251 - protein, 371 aa, Neisseria
  VARIANT (1)...(371): Xaa = Any Amino Acid
MIYQRNLIKELSFTAVGIFVVLLAVLVSTQAINLLGXAADXRXAIDAVLALVGFWVXXMTPLLLVLTAFISTLTVLTRYWRDSEMSVWXSCGLALKQWIRPVMQFAVPFAVLVAVMQLWVIPWAELRSREYAEILKQKQELSLVEAGGFNSLGKRNGRVYFVETFDTESGIMKNLFLREQDKNGGDNIIFXKESNFSLNDNKRTLELRHGYRYSGTPGRADYNQVSFXKLNLIISTTPKLIDPVSHRRTXPTAQLIGSSNPQHXAELMWRISLTVSVLLLCLLAVPLSYFNPRSGHTYNILXAIGLFLIYQNGLTLLFEAVEDGKIHFWLGLLPMHIIMFVIAIVLLRVRSMPSQPFWQAVGKSLTLKGGK

SEQ ID NO: 252 - protein, 362 aa, Neisseria
MIYQRNLIKELSFTAVGIFVVLLAVLVSTQAINLLGRAADGRVAIDAVLALVGFWVIGMTPLLLVLTAFISTLTVLTRYWRDSEMSVWLSCGLALKQWIRPVMQFAVPFAILIAVMQLWVIPWAELRSREYAEILKQKQELSLVEAGEFNNLGKRNGRVYFVETFDTESGIMKNLFLREQDKNGGDNIIFAKEGNFSLKDNKRTLELRHGYRYSGTPGRADYNQVSFQKLNLIISTTPKLIDPVSHRRTISTAQLIGSSNPQHQAELMWRISLTVSVLLLCLLAVPLSYFNPRSGHTYNILIAIGLFLIYQNGLTLLFEAVEDGKIHFWLGLLPMHIIMFVIAIVLLRVRSMPSQPFWQAVG

SEQ ID NO: 253 - protein, 371 aa, Neisseria
MIYQRNLIKELSFTAVGIFVVLLAVLVSTQAINLLGRAADGRVAIDAVLALVGFWVIGMTPLLLVLTAFISTLTVLTRYWRDSEMSVWLSCGLALKQWIRPVMQFAVPFAILIAVMQLWVIPWAELRSREYAEILKQKQELSLVEAGEFNNLGKRNGRVYFVETFDTESGIMKNLFLREQDKNGGDNIIFAKEGNFSLKDNKRTLELRHGYRYSGTPGRADYNQVSFQKLNLIISTTPKLIDPVSHRRTISTAQLIGSSNPQHQAELMWRISLTVSVLLLCLLAVPLSYFNPRSGHTYNILIAIGLFLIYQNGLTLLFEAVEDGKIHFWLGLLPMHIIMFVIAIVLLRVRSMPSQPFWQAVGKSLTLKGGK

SEQ ID NO: 254 - protein, 135 aa, Neisseria
  VARIANT (1)...(135): Xaa = Any Amino Acid
GGGFINASCATLTTAKPQYQAGDLSAFKIRQGNVVIAGHGLDARDTDYTRILSYHSKIDAPVWGQDVRVVAGQNDVAATGDAHSPILNNAAANTSNNTANNGTHIPLFAIDTGKLGGXVCQQNHLDQYGRASRHS

SEQ ID NO: 255 - protein, 263 aa, Neisseria; identical to SEQ ID NO: 93

SEQ ID NO: 256 - protein, 325 aa, Neisseria
STGHSEQNYTLPREITRNISLGSFAYESHRKALSHHAPSQGTELPQSNGISLPYTSNSFTPLPSSSLYIINPVNKGYLVETDPRFANYRQWLGSDYMLDSLKLDPNNLHKRLGDGYYEQRLINEQIAELTGHRRLDGYQNDEEQFKALMDNGATAARSMNLSVGIALSAEQVAQLTSDIVWLVQKEVKLPDGGTQTVLVPQVYVRVKNGDIDGKGALLSGSNTQINVSGSLKNSGTIAGRNALIINTDTLDNIGGRIHAQKSAVTATQDINNIGGMLSAEQTLLLNAGNNINSQSTTASSQNTQGSSTYLDRMAGIYITGKEKGV

SEQ ID NO: 257 - protein, 721 aa, Neisseria
MLVQTEKDGLHNEQTFGEKKVFSENGKLHNYWRARRKGHDETGHREQNYTLPEEITRDISLGSFAYESHSKALSRHAPSQGTELPQSNRDNIRTAKSNGISLPYTPNSFTPLPGSSLYIINPANKGYLVETDPRFANYRQWLGSDYMLGSLKLDPNNLHKRLGDGYYEQRLINEQIAELTGHRRLDGYQNDEEQFKALMDNGATAARSMNLSVGIALSAEQAAQLTSDIVWLVQKEVKLPDGGTQTVLMPQVYVRVKNGGIDGKGALLSGSNTQINVSGSLKNSGTIAGRNALIINTDTLDNIGGRIHAQKSAVTATQDINNIGGILSAEQTLLLNAGNNINNQSTAKSSQNAQGSSTYLDRMAGIYITGKEKGVLAAQAGKDINIIAGQISNQSDQGQTRLQAGRDINLDTVQTGKYQEIHFDADNHTIRGSTNEVGSSIQTKGDVTLLSGNNLNAKAAEVGSAKGTLAVYAKNDITISSGIHAGQVDDASKHTGRSGGGNKLVITDKAQSHHETAQSSTFEGKQVVLQAGNDANILGSNVISDNGTRIQAGNHVRIGTTQTQSQSETYHQTQKSGLMSAGIGFTIGSKTNTQENQSQSNEHTGSTVGSLKGDTTIVASKHYEQTGSNVSSPEGNNLISTQSMDIGAAQNQLNSKTTQTYEQKGLTVAFSSPVTDLAQQAIAVAHKAAKQFDKAKTTALMPWRLPMQVGRLFKQAKAPKK

SEQ ID NO: 258 - protein, 721 aa, Neisseria
LLVQTEKDGLHNEQTFGEKKVFSENGKLHNYWRARRKGHDETGHREQNYTLPEEITRDISLGSFAYESHSKALSRHAPSQGTELPQSNRDNIRTAKSNGISLPYTPNSFTPLPGSSLYIINPANKGYLVETDPRFANYRQWLGSDYMLGSLKLDPNNLHKRLGDGYYEQRLINEQIAELTGHRRLDGYQNDEEQFKALMDNGATAARSMNLSVGIALSAEQAAQLTSDIVWLVQKEVKLPDGGTQTVLMPQVYVRVKNGGIDGKGALLSGSNTQINVSGSLKNSGTIAGRNALIINTDTLDNIGGRIHAQKSAVTATQDINNIGGILSAEQTLLLNAGNNINNQSTAKSSQNAQGSSTYLDRMAGIYITGKEKGVLAAQAGKDINIIAGQISNQSDQGQTRLQAGRDINLDTVQTGKYQEIHFDADNHTIRGSTNEVGSSIQTKGDVTLLSGNNLNAKAAEVGSAKGTLAVYAKNDITISSGIHAGQVDDASKHTGRSGGGNKLVITDKAQSHHETAQSSTFEGKQVVLQAGNDANILGSNVISDNGTRIQAGNHVRIGTTQTQSQSETYHQTQKSGLMSAGIGFTIGSKTNTQENQSQSNEHTGSTVGSLKGDTTIVASKHYEQTGSNVSSPEGNNLISTQSMDIGAAQNQLNSKTTQTYEQKGLTVAFSSPVTDLAQQAIAVAHKAANKSDKAKTTALMPWRLPMQVGRPIKQAKAHKT

SEQ ID NO: 259 - protein, 230 aa, Neisseria
  VARIANT (1)...(230): Xaa = Any Amino Acid
SGNNLNAKAAEVSSANGTLAVSANNDINISAGINTTHVDDASKHTGRSGGGNKLVITDKAQSHHETAQSSTFEGKQVVLQAGNDANILGSNVISDNGTQIQAGNHVRIGTTQTQSQSETYHQTQKSGLMSAGIGFTIGSKTNTQENQSQSNEHTGSTVGSLKGDTTIVAGKHYEQIGSTVSSPEGNNTIYAQSIDIQAAHNKLNSNTTQTYEQKXLTVAFSSPVTDLAQQ

SEQ ID NO: 260 - protein, 721 aa, Neisseria
LLVQTEKDGLHNEQTFGEKKVFSENGKLHNYWRARRKGHDETGHREQNYTLPEEITRDISLGSFAYESHSKALSRHAPSQGTELPQSNRDNIRTAKSNGISLPYTPNSFTPLPGSSLYIINPANKGYLVETDPRFANYRQWLGSDYMLGSLKLDPNNLHKRLGDGYYEQRLINEQIAELTGHRRLDGYQNDEEQFKALMDNGATAARSMNLSVGIALSAEQAAQLTSDIVWLVQKEVKLPDGGTQTVLMPQVYVRVKNGGIDGKGALLSGSNTQINVSGSLKNSGTIAGRNALIINTDTLDNIGGRIHAQKSAVTATQDINNIGGILSAEQTLLLNAGNNINNQSTAKSSQNAQGSSTYLDRMAGIYITGKEKGVLAAQAGKDINIIAGQISNQSDQGQTRLQAGRDINLDTVQTGKYQEIHFDADNHTIRGSTNEVGSSIQTKGDVTLLSGNNLNAKAAEVGSAKGTLAVYAKNDITISSGIHAGQVDDASKHTGRSGGGNKLVITDKAQSHHETAQSSTFEGKQVVLQAGNDANILGSNVISDNGTRIQAGNHVRIGTTQTQSQSETYHQTQKSGLMSAGIGFTIGSKTNTQENQSQSNEHTGSTVGSLKGDTTIVASKHYEQTGSNVSSPEGNNLISTQSMDIGAAQNQLNSKTTQTYEQKGLTVAFSSPVTDLAQQAIAVAHKAAKQFDKAKTTALMPWRLPMQVGRLFKQAKAPKK

SEQ ID NO: 261 - protein, 721 aa, Neisseria; identical to SEQ ID NO: 258

SEQ ID NO: 262 - protein, 175 aa, Neisseria
  VARIANT (1)...(175): Xaa = Any Amino Acid
MIYIVLFLAVVLAVVAYNMYQENQYRKKVRDQFGHSDKDALLNSXTSHVRDGKPSGGSVMMPKPQPAVKKTAKPQDPXMRNLQEQDAVYIAKQKQAKASPFKTEIETALEESGIIGNSAHTVSEPQTGHSATKPADASAKPAPVPQTPAKPLITLKELSKVELSWFDVRIDFISY

SEQ ID NO: 263 - protein, 428 aa, Neisseria
MIYIVLFLAVVLAVVAYNMYQENQYRKKVRDQFGHSDKDALLNSKTSHVRDGKPSGGSVMMPKPQPAVKKTAKPQDPAMRNLQEQDAVYIAKQKQAKASPFKTEIETALEESGIIGNSAHTVSEPQTGHSAPKPADAPAKPAPVPQTPAKPLITLKELSKVELPWFDVRFDFISYIALTEAKELHALPRLSNRCRYQIVGCTMDDHFQIAEPIPGIRYQAFIVGIQAVSRNGLASQEELSAFNRQVDAFAQSMGGQTLHTDLAAFIEVASALDAFCARVDQTIAIHLVSPTSISGVELRSAVTGVGFVLEDDGAFHYTDTSGSTMFSICSLNNEPFTNALLDNQSYKGFSMLLDIPHSPAGEKTFDDLFMDLAVRLSGQLNLNLVNDKMEEVSTQWLKDVRTYVLARQSEMLKVGIEPGGKTALRLFS

SEQ ID NO: 264 - protein, 428 aa, Neisseria
MIYIVLFLAAVLAVVAYNMYQENQYRKKVRDQFGHSDKDALLNSKTSHVRDGKPSGGPVMMPKPQPAVKKTAKSQDPAMRNLQEQDAVYIAKQKQAKASPFKTEIETALEESGIIGNSAHTVPEPQTGHSAPKPADAPAKPVPVPQTPAKPLITLKELSKVELPWFDVRFDFISYIALTEAKELHALPRLSNRCRYQIVGCTMDDHFQIAEPIPGIRYQAFIVGIQAVSRNGLASQEELSAFNRQVDAFAHSMGGQTLHTDLAAFIEVASALDAFCARVDQTIAIHLVSPTSISGVELRSAVTGVGFVLEDDGAFHYTDTSGSTMFSICSLNNEPFTNALLDNQSYKGFSMLLDIPHSPAGEKTFDDLFMDLAVRLSGQLNLNLVNDKMEEVSTQWLKDVRTYVLARQSEMLKVGIEPGGKTALRLFS

SEQ ID NO: 265 - protein, 428 aa, Neisseria
MIYIVLFLAAVLAVVAYNMYQENQYRKKVRDQFGHSDKDALLNSKTSHVRDGKPSGGPVMMPKPQPAVKKPAKPQDSAMRNLQEQDAVYIAKQKQAKASPFKTEIETALEEIGIIGNSAHTVSEPQTGHSAPKPADAPAKPVPVPQTPAKPLITLKELSKVELPWFDVRFDFISYIALTEAKELHALPRLSNRCRYQIVGCTMDDHFQIAEPIPGIRYQAFIVGIQAVSRNGLASQEELSAFNRQADAFAQSMGGQTLHTDLAAFIEVASALDAFCARVDQTIAIHLVSPTSISGVELRSAVTGVGFVLEDDGAFHYTDTSGSTMFSICSLNNEPFTNALLDNQSYKGFSMLLDIPHSPAGEKTFDDLFMDLAVRLSGQLNLNLVNDKMEEVSTQWLKDVRTYVLARQSEMLKVGIEPGGKTALRLFS

SEQ ID NO: 266 - protein, 154 aa, Neisseria
  VARIANT (1)...(154): Xaa = Any Amino Acid
ARHGTEDFFMNNSDXIRQIVESTTGTMKLLISSIALISLVVGGIGVMNIMLVSVTERTKEIGIRMAIGARRGNIXQQFLIEAVLICVIGGLVGVGLSAAVSLVFNHFVTDFPMDISAMSVIGAVACSTGIGIAFGFMPANKAAKLNPIDALAQD

SEQ ID NO: 267 - protein, 388 aa, Neisseria
MSVQAVLAHKMRSLLTMLGIIIGIASVVSVVALGNGSQKKILEDISSIGTNTISIFPGRGFGDRRSGRIKTLTIDDAKIIAKQSYVASATPMTSSGGTLTYRNTDLTASLYGVGEQYFDVRGLKLETGRLFDENDVKEDAQVVVIDQNVKDKLFADSDPLGKTILFRKRPLTVIGVMKKDENAFGNSDVLMLWSPYTTVMHQITGESHTNSITVKIKDNANTQVAEKGLTDLLKARHGTEDFFMNNSDSIRQIVESTTGTMKLLISSIALISLVVGGIGVMNIMLVSVTERTKEIGIRMAIGARRGNILQQFLIEAVLICVIGGLVGVGLSAAVSLVFNHFVTDFPMDISAMSVIGAVACSTGIGIAFGFMPANKAAKLNPIDALAQD

SEQ ID NO: 268 - protein, 388 aa, Neisseria; identical to SEQ ID NO: 267

SEQ ID NO: 269 - protein, 388 aa, Neisseria
MSVQAVLAHKMRSLLTMLGIIIGIASVVSVVALGNGSQKKILEDISSMGTNTISIFPGRGFGDRRSGKIKTLTIDDAKIIAKQSYVASATPMTSSGGTLTYRNTDLTASLYGVGEQYFDVRGLKLETGRLFDENDVKEDAQVVVIDQNVKDKLFADSDPLGKTILFRKRPLTVIGVMKKDENAFGNSDVLMLWSPYTTVMHQITGESHTNSITVKIKDNANTRVAEKGLAELLKARHGTEDFFMNNSDSIRQMVESTTGTMKLLISSIALISLVVGGIGVMNIMLVSVTERTKEIGIRMAIGARRGNILQQFLIEAVLICIIGGLVGVGLSAAVSLVFNHFVTDFPMDISAASVIGAVACSTGIGIAFGFMPANKAAKLNPIDALAQD

SEQ ID NO: 270 - protein, 201 aa, Neisseria
GTGAMLLLFYAVTILPLATGVTLSYTSSIFLAVFSFLILKERISVYTQAVLLLGFAGVVLLLNPSFRSGQETAALAGLAGGAMSGWAYLKVRELSLAGEPGWRVVFYLSVTGVAMSSVWATLTGWHTLSFPSAVYLSCIGVSALIAQLSMTRAYKVGDKFTVASLSYMTVVFSALSAAFFLGEELFWQEILGMCIIISAVF

SEQ ID NO: 271 - protein, 300 aa, Neisseria
  VARIANT (1)...(300): Xaa = Any Amino Acid
MDTAKKDILGSGWMLVAAACFTIMNVLIKEASAKFALGSGELVFWRMLFSTVALGAAAVLRRDXFRTPHWKNHLNRSMVGTGAMLLLFYAVTHLPLATGVTLSYTSSIFLAVFSFLILKERISVYTQAVLLLGFAGVVLLLNPSFRSGQETAALAGLAGGAMSGWAYLKVRELSLAGEPGWRVVFYLSVTGVAMSSVWATLTGWHTLSFPSAVYLSCIGVSALIAQLSMTRAYKVGDKFTVASLSYMTVVFSALSAAFFLGEELFWQEILGMCIIILSGILSSIRPTAFKQRLQSLFRQR

SEQ ID NO: 272 - protein, 300 aa, Neisseria
MDTAKKDILGSGWMLVAAACFTIMNVLIKEASAKFALGSGELVFWRMLFSTVALGAAAVLRRDTFRTPHWKNHLNRSMVGTGAMLLLFYAVTHLPLATGVTLSYTSSIFLAVFSFLILKERISVYTQAVLLLGFAGVVLLLNPSFRSGQETAALAGLAGGAMSGWAYLKVRELSLAGEPGWRVVFYLSVTGVAMSSVWATLTGWHTLSFPSAVYLSCIGVSALIAQLSMTRAYKVGDKFTVASLSYMTVVFSALSAAFFLAEELFWQEILGMCIIILSGILSSIRPTAFKQRLQSLFRQR

SEQ ID NO: 273 - protein, 506 aa, Neisseria
MPSEKAFRRHLRTASFQGLHLHHFHQKVGKCGIIGFGIHIFPTLLPAAQGILDIQLGLFRIDFAALAVYRRTQVDFIHTVIDGIASDQAFSEVVQILRRLNLGHFTDTHLIAQARRFIADFGNIRPMRRGEAKTFCRCFRFDGIDGIHGDFRQCGHINRLAPGKDCRNGKRDKVFFHTRHYNQVCLEKTNCSARKIKFRHQKQAKTHSTSLAARFTIRPSLSQRPFMDTAKKDILGSGWMLVAAACFTVMNVLIKEASAKFALGSGELVFWRMLFSTVTLGAAAVLRRDTFRTPHWKNHLNRSMVGTGAMLLLFYAVTHLPLTTGVTLSYTSSIFLAVFSFLILKERISVYTQAVLLLGFAGVVLLLNPSFRSGQEPAALAGLAGGAMSGWAYLKVRELSLAGEPGWRVVFYLSATGVAMSSVWATLTGWHTLSFPSAVYLSGIGVSALIAQLSMTRAYKVGDKFTVASLSYMTVVFSALSAAFFLGEELFWQEILGMCIIISAAF

SEQ ID NO: 274 - protein, 300 aa, Neisseria
MDTAKKDILGSGWMLVAAACFTVMNVLIKEASAKFALGSGELVFWRMLFSTVTLGAAAVLRRDTFRTPHWKNHLNRSMVGTGAMLLLFYAVTHLPLTTGVTLSYTSSIFLAVFSFLILKERISVYTQAVLLLGFAGVVLLLNPSFRSGQEPAALAGLAGGAMSGWAYLKVRELSLAGEPGWRVVFYLSATGVAMSSVWATLTGWHTLSFPSAVYLSGIGVSALIAQLSMTRAYKVGDKFTVASLSYMTVVFSALSAAFFLGEELFWQEILGMCIIILSGILSSIRPIAFKQRLQALFRQR

SEQ ID NO: 275 - protein, 234 aa, Neisseria
  VARIANT (1)...(234): Xaa = Any Amino Acid
MKRRIAVFVLFPQIIRVLGQLLPKIVNTVPAHRMLFQIFGMFFFFIHQQYLPGIAEIDSPCGIVFGALLFRHLPAHCLYGKAAVGDAVAHEHPVADVVNRNANAFALFDIGQFAXFIVQHTVNIKTVKINIVDPHMFANFAVFAVLEKRDFDHGKIQGGNNAAAFPKKLAPKIFECFTGAFVGTVYRFVCLFYIINDGIAHHSAPQRVRYLFAPYCGFLPSASDSDLKSSXXSE

SEQ ID NO: 276 - protein, 235 aa, Neisseria
MMKRRIAVFVLFPQIIRVLGQLLPKIVNTVPAHRMLFQIFGMFFFFIHQQYLPGIAEIDSPCGIVFGALLFRHLPAHCLYGKAAVGDAVAHEHPVADVVNRNANAFALFDIGQFAGFIVQHTVNIKTVKINIVDPHMFANFAVFAVLEKRDFDHGKIQGGNNAAAFPKKLAPKIFECFTGAFVGTVYRFVCLFYIINDGIAHHSAPQRVRYLFAPYCGFLPSASDSDLKSSKYSE

SEQ ID NO: 277 - protein, 234 aa, Neisseria
  VARIANT (1)...(234): Xaa = Any Amino Acid
MMKRRIAVFVLLMQKIRILGQLLPKIVNTVPAHRMLFQXFGMFFFFIHQQYLPGIAEIDSPCGIVFGTLLFRHXSTHCLYGKAAVGNAVAHEHPVADVVNRNANAFALFDIGQFAGFIVQHAINVKTVKINIVDPHMFANFAXFAVLEKRALTMAKSKXXXMRRRSQKSSRQKYLNVLRARSPARFTGLSACSTXMTESPIISAPQRVRYLFAPYCGFLPSASDSDLKSSKYSE

SEQ ID NO: 278 - protein, 235 aa, Neisseria
MMKRRIAVFVLLMQKIRILGQLLPKIVNTVPAHRMLFQIFGMFFFFIHRQYLPGIAEIDSPGGIVFGTLLFRHLSAHCLYGKAAVGDAVAHEHPVADVANRNANAFALFDIGQSAGFIVQHTVNIKTVKINIVDPHMFANFAVFAVLEKRDFDHGKIQGGNNAAAFPKKLAPKVFECFTGAFAGTVYRFVCLFYIINDGIAHHTAPQRVRYLFAPYRGFLPPASDSDLKSSKYSE

SEQ ID NO: 279 - protein, 149 aa, Neisseria
  VARIANT (1)...(149): Xaa = Any Amino Acid
MENMVTFSKIRPLLAIAAAALLAAXRTAGNNAVRKPVQTAKPAAVVGLALGGGASKGFAHVGIIKVLKENGIPVKVVTGTSAGSIVGNLFASGMSPDRLELEAEILGKTDLVDLTLSTNGFIKGAKLQNYINRKLRGMQIQQFPIKFAA

SEQ ID NO: 280 - protein, 300 aa, Neisseria
MENMVTFSKIRPLLAIAAAALLAACGTAGNNAVRKPVQTAKPAAVVGLALGGGASKGFAHVGIIKVLKENGIPVKVVTGTSAGSIVGSLFASGMSPDRLELEAEILGKTDLVDLTLSTSGFIKGEKLQNYINRKVGGRQIQQFPIKFAAVATDFETGKAVAFNQGNAGQAVRASAAIPNVFQPVIIGRHTYVDGGLSQPVPVSAARRQGANFVIAVDISARPGKNISQGFFSYLDQTLNVMSVSALQNELGQADVVIKPQVLDLGAVGGFDQKKRAIRLGEEAARAALPEIKRKLAAYRY

SEQ ID NO: 281 - protein, 300 aa, Neisseria
  VARIANT (1)...(300): Xaa = Any Amino Acid
MENMVTFSKIRPLLAIAAAALLAACGTAGNNAARKPVQTAKPAAVVGLALGGGASKGFAHVGIIKVLKENGIPVKVVTGTSAGSIVGSLFASGMSPDRLELEAEILGKTDLVDLTLSTSGFIKGEKLQNYINRKVGGRRIQQFPIKFAAVATDFETGKAVAFNQGNAGQAVRASAAIPNVFQPVIIGRHTYVDGGLSQPVPVSAARRXXXXXVIAVDISARPSKNISQGFFSYLDQTLNVMSVSALQNELGQADVVIKPQVLDLGAVGGFDQKKRAIRLGEEAARAALPEIKRKLAAYRY

SEQ ID NO: 282 - protein, 300 aa, Neisseria
MENMVTFSKIRSFLAIAAAALLAACGTAGNNAARKPVQTAKPAAVVALALGGGASKGFAHIGIVKVLKENGIPVKVVTGTSAGSIVGSLLASGMSPDRLELEAEILGKTDLVDLTLSTSGFIKGEKLQNYINRKVGGRQIQQFPIKFAAVATDFETGKAVAFNQGNAGQAVRASAAIPNVFQPVIIGRHKYVDGGLSQPVPVSAARRQGANFVIAVDISARPSKNVGQGFFSYLDQTLNVMSVSVLQNELGQADVVIKPQVLDLGAVGGFDQKKRAIRLGEEAARAALPEIKRKLAAYRY

SEQ ID NO: 283 - protein, 123 aa, Neisseria
  VARIANT (1)...(123): Xaa = Any Amino Acid
MFRLQFRLFPPLRTAMHILLTALLKCLSLLPLSCLHTLGNRLGHLAFYLLKEDRARIVAXMRQAGLNPDPKTVKAVFAETAKGGLELAPAFFRKPEDIETMFKAVHGWEHVQQALDKHEGLLF

SEQ ID NO: 284 - protein, 298 aa, Neisseria
MFRLQFRLFPPLRTAMHILLTALLKCLSLLPLSCLHTLGNRLGHLAFYLLKEDRARIVANMRQAGLNPDPKTVKAVFAETAKGGLELAPAFFRKPEDIETMFKAVHGWEHVQQALDKHEGLLFITPHIGSYDLGGRYISQQLPFPLTAMYKPPKIKAIDKIMQAGRVRGKGKTAPTSIQGVKQIIKALRSGEATIVLPDHVPSPQEGGEGVWVDFFGKPAYTMTLAAKLAHVKGVKTLFFCCERLPGGQGFDLHIRPVQGELNGDKAHDAAVFNRNAEYWIRRFPTQYLFMYNRYKMP

SEQ ID NO: 285 - protein, 298 aa, Neisseria; identical to SEQ ID NO: 284

SEQ ID NO: 286 - protein, 297 aa, Neisseria
MFRLQFRLFPPLRTAMHILLTALLKCLSLLSLSCLHTLGNRLGHLAFYLLKEDRARIVANMRQAGLNPDTQTVKAVFAETAKCGLELAPAFFKKPEDIETMFKAVHGWEHVQQALDKGEGLLFITPHIGSYDLGGRYISQQLPFHLTAMYKPPKIKAIDKIMQAGRVRGKGKTAPTGIQGVKQIIKALRAGEATIILPDHVPSPQEGGGVWADFFGKPAYTMTLAAKLAHVKGVKTLFFCCERLPDGQGFVLHIRPVQGELNGNKAHDAAVFNRNTEYWIRRFPTQYLFMYNRYKTP

SEQ ID NO: 287 - protein, 189 aa, Neisseria
  VARIANT (1)...(189): Xaa = Any Amino Acid
AWSAGESWRVLMESETWHAVWNTLRFSAAAVYAAAVLGVVYAAPARRSAWMRGLMFXPFMVSPVCVSAGVLLLYPQWTASLPLLLAMYALLAYPFVAKDVLSAWDALPPDYGRAAAGLGANGFQTACRITFPLLKPALRRGLTLAAATCVGEFAATLFLSRPEWQTLTTLIYAYLGRAGEDNYARAMVL

SEQ ID NO: 288 - protein, 513 aa, Neisseria
MDGRRWVVWGAFALLPSAFLAVMVVAPLWAVAAYDGLAWRAVLSDAYMLKRLAWTVFQAAATCVLVLPLGVPVAWVLARLAFPGRALVLRLLMLPFVMPTLVAGVGVLALFGADGLLWRGRQDTPYLLLYGNVFFNLPVLVRAAYQGFVQVPAARLQTARTLGAGAWRRFWDIEMPVLRPWLAGGVCLVFLYCFSGFGLALLLGGSRYATVEVEIYQLVMFELDMAVASVLVWLVLGVTAAAGLLYAWFGRRAVSDKAVSPVMPSPPQSVGEYVLLAFAAAVLSVCCLFPLLAIVVKAWSAGESWRVLMESETWQAVWNTLRFSAAAVYAAAVLGVVYAAAARRSAWMRGLMFLPFMVSPVCVSAGVLLLYPQWTASLPLLLAMYALLAYPFVAKDVLSAWDALPPDYGRAAAGLGANGFQTACRITFPLLKPALRRGLTLAAATCVGEFAATLFLSRPEWQTLTTLIYAYLGRAGEDNYARAMVLTLLLAAFALGIFLLLDGGEGGKQTETL

SEQ ID NO: 289 - protein, 513 aa, Neisseria
  VARIANT (1)...(513): Xaa = Any Amino Acid
MDGRRWAVWGAFALLPSAFLAAMVVAPLWAVAAYDGLAWRAVLSDAYMLKRLAWTVFQAAATCVLVLPLGVPVAWVLARLAFPGRALVLRLLMLPFVMPTLVAGVGVLALFGADGLXWRGWQDTPYLLLYGNVFFXLPVLVRAAYQGFVQVPAARLQTAXTLGAGAWRRFWDIEMPVLRPWLAGGVCLVFLYCFSGFGLALLLGGSRYATVEVEIYQLVMFELDMAVASVLVWLVXGVTAAAGLLYAWFGRRAVSDKAVSPVMPSPPQSVGEYVLLAFAAAVXSVCCLFXLLAIVVKAWSAGESWRVLMESETWQAVWNTXRFSAAAVYAAAVLGVVYAAAARRSAWMRGLMFLPFMVSPVCVSAGVLLLXPQWTASLPLLLAMYALLAYPFVAKDVLSAXDALPPDYGRAAAGLGANGFQTACRITFPLLKPALRRGLTLAAATCVGEFAATLFXSRXEWQTLTTLIYAYXGRAGXDNYARAMVLTLLLAAFALGXFLLLDGGEGGKRTETL

SEQ ID NO: 290 - protein, 513 aa, Neisseria
MDGRCWAVRGAFSLLPSAFLAVMVVAPLWAVAAYDGLAWRAVLSDAYMLKRLAWTVFQAAATCVLVLPLGVPVAWVLARLAFPGRALVLRLLMLPFVMPTLVAGVGVLALFGADGLLWRGRQDTPYLLLYGNVFFNLPVLVRAAYQGFAQVPAARLQTARTLGAGAWRPFWDIEMPVLRPWLAGGVCLVFLYCFSGFGLALLLGGSRYATVEVEIYQLVMFELDMAGASALVWLVLGVTAAAGLLYAWFGRRAVSDKAVSPVMPSPPQSVGEYVLLAFSVAVLSVCCLFPLSAIVVKAWSAGESRRVLMESETWQAVWNTLRFSAAAVFAAAVLGVVYAAAARRLVWMRGLVFLPFMVSPVCVSAGVLLLYPGWTASLPLLLAMYALLAYPFVAKDVLSAWDALPPDYGRAAAGLGANGFQTACRITFPLLKPALRRGLTLAAATCVGEFAATLFLSRPEWQTLTTLIYAYLGRAGEDNYARAMVLTLLLSAFAVCIFLLLDNGEGGKRTETL

SEQ ID NO: 291 - protein, 513 aa, Neisseria
MDGRCWAVRGAFSLLPSAFLAVMVVAPLWAVAAYDGLAWRAVLSDAYMLKRLAWTVFQAAATCVLVLPLGVPVAWVLARLAFPGRALVLRLLMLPFVMPTLVAGVGVLALFGADGLLWRGRQDTPYLLLYGNVFFNLPVLVRAAYQGFAQVPAARLQTARTLGAGAWRRFWDIEMPVLRPWLAGGVCLVFLYCFSGFGLALLLGGSRYATVEVEIYQLVMFELDMAGASALVWLVLGVTAAAGLLYAWFGRRAVSDKAVSPVMPSPPQSVGEYVLLAFSVAVLSVCCLFPLSAIVVKAWSAGESRRVLMESETWQAVWNTLRFSAAAVFAAAVLGVVYAAAARRLVWMRGLVFLPFMVSPVCVSAGVLLLYPGWTASLPLLLAMYALLAYPFVAKDVLSAWDALPPDYGRAAAGLGANGFQTACRITFPLLKPALRRGLTLAAATCVGEFAATLFLSRPEWQTLTTLIYAYLGRAGEDNYARAMVLTLLLSAFAVCIFLLLDNGEGGKRTETL

SEQ ID NO: 292 - protein, 87 aa, Neisseria
MDGWTQTLSAQTLLGISAAAIILILILIVRFRIHALLTLVIVSLLTALATGLPTGSIVKDILVKNFGGTLGGVALLVGLGAMLERLV

SEQ ID NO: 293 - protein, 461 aa, Neisseria
MDGWTQTLSAQTLLGISAAAIILILILIVKFRIHALLTLVIVSLLTALATGLPTGSIVNDILVKNFGGTLGGVALLVGLGAMLGRLVETSGGAQSLADALIRMFGEKRAPFALGVASLIFGFPIFFDAGLIVMLPIVFATARRMKQDVLPFALASIGAFSVMHVFLPPHPGPIAASEFYGANIGQVLILGLPTAFITWYFSGYMLGKVLGRTIHVPVPELLSGGTQDNDLPKEPAKAGTVVAIMLIPMLLIFLNTGVSALISEKLVSADETWVQTAKIIGSTPIALLISVLVALFVLGRKRGESGSALEKTVDGALAPVCSVILITGAGGMFGGVLRASGIGKALADSMADLGIPVLLGCFLVALALRIAQGSATVALTTAAALMAPAVAAAGFTDWQLACIVLATAAGSVGCSHFNDSGFWLVGRLLDMDVPTTLKTWTVNQTLIALIGFALSALLFAIV

SEQ ID NO: 294 - protein, 461 aa, Neisseria
MDGWTQTLSAQTLLGISAAAIILILILIVKFRIHALLTLVIVSLLTALATGLPTGSIVNDVLVKNFGGTLGGVALLVGLGAMLGRLVETSGGAQSLADALIRMFGEKRAPFALGVASLIFGFPIFFDAGLIVMLPIVFATARRMKQDVLPFALASIGAFSVMHVFLPPHPGPIAASEFYGANIGQVLILGLPTAFITWYFSGYMLGKVLGRTIHVPVPELLSGGTQDNDLPKEPAKAGTVVAIMLIPMLLIFLNTGVSALISEKLVSADETWVQTAKIIGSTPIALLISVLVALFVLGRKRGESGSALEKTVDGALAPVCSVILITGAGGMFGGVLRASGIGKALADSMADLGIPVLLGCFLVALALRIAQGSATVALTTAAALMAPAVAAAGFTDWQLACIVLATAAGSVGCSHFNDSGFWLVGRLLDMDVPTTLKTWTVNQTLIALIGFALSALLFAIV

SEQ ID NO: 295 - protein, 461 aa, Neisseria
MDGRTQTLSAQTLLGISAAAIILILILIVKFRIRALLTLVIASLLTALATGLPTGSIVNDVLVKNFGGTLGGVALLVGLGAMLGRLVETSGGAQSLADALIRMFGEKRAPFAPGVASLIFGFPIFFDAGLIVMLPIVFATARRMKQDVLPFALASVGAFSVMHVFLPPHPGPIAASEFYGANIGQVLILGLPTAFITWYFSGYMLGKVLGRAIHVPVPELLSGGTQDSDPPKEPAKAGTVVAVMLIPMLLIFLNTGVSALISEKLVSADETWVQTAKMIGSTPVALLISVLAALLVLGRKRGESGSTLEKTVDGALAPACSVILITGAGGMFGGVLRASGIGKALADSMADLGIPVLLGCFLVALALRIAQGSATVALTTAAALMAPAVAAAGFTDWQLACIVLATAAGSVGCSHFNDSGFWLVGRLSDMDVPTTLKTWTVNQTLIAFIGFALSALLFAIV

SEQ ID NO: 296 - protein, 461 aa, Neisseria
MDGRTQTLSAQTLLGISAAAIILILILIVKFRIRALLTLVIASLLTALATGLPTGSIVNDVLVKNFGGTLGGVALLVGLGAMLGRLVETSGGAQSLADALIRMFGEKRAPFAPGVASLIFGFPIFFDAGLIVMLPIVFATARRMKQDVLPFALASVGAFSVMHVFLPPHPGPIAASEFYGANIGQVLILGLPTAFITWYFSGYMLGKVLGRAIHVPVPELLSGGTQDSDPPKEPAKAGTVVAVMLIPMLLIFLNTGVSALISEKLVSADETWVQTAKMIGSTPVALLISVLAALLVLGRKRGESGSTLEKTVDGALAPACSVILITGAGGMFGGVLRASGIGKALADSMADLGIPVLLGCFLVALALRIAQGSATVALTTAAALMAPAVAAAGFTDWQLACIVLATAAGSVGCSHFNDSGFWLVGRLLDMDVPTTLKTWTVNQTLIAFIGFALSALLFAIV

SEQ ID NO: 297 - protein, 140 aa, Neisseria
  VARIANT (1)...(140): Xaa = Any Amino Acid
DFGISPVYLWVAAAFKHLLSPWAADSYDVARFAGVFFAVIGLTSCGFAGFNFLGRHHGRXVVLILIGCIGLIPVAHFLNPAAAAFAAAGLVLHGYSLARRRVIAASFLLGTGWTLMSLAAAYPAAFALMLPLPVLMFFRP

SEQ ID NO: 298 - protein, 553 aa, Neisseria
MLTYTPPDARPPAKTHEKPWLLLLMAFAWLWPGVFSHDLWNPDEPAVYTAVEALAGSPTPLVAHLFGQTDFGIPPVYLWVAAAFKHLLSPWAADSYDAARFAGVFFAVIGLTSCGFAGFNFLGRHHGRSVVLILIGCIGLIPVAHFLNPAAAAFAAAGLVLHGYSLARRRVIAASFLLGTGWTLMSLAAAYPAAFALMLPLPVLMFFRPWQSRRLMLTAVASLAFALPLMTVYPLLLAKTQPALFAQWLDYHVFGTFGGVRHVQTAFSLFYYLKNLLWFALPALPLAVWTVCRTRLFSTDWGILGVVWMLAVLVLLAVNPQRFQDNLVWLLPPLALFGAAQLDSLRRGAAAFVNWFGIMAFGLFAVFLWTGFFAMNYGWPAKLAERAAYFSPYYVPDIDPIPMAVAVLFTPLWLWAITRKNIRGRQAVTNWAAGVTLTWALLMTLFLPWLDAAKSHAPVVRSMEASLSPELKRELSDGIECIGIGGGDLHTRIVWTQYGTLPHRVGDVQCRYRIVLLPQNADAPQGWQTVWQGARPRNKDSKFALIRKIGENI

SEQ ID NO: 299 - protein, 558 aa, Neisseria
MLTYTPPDARPPAKTHEKPWLLLLMAFAWLWPGVFSHDLWNPDEPAVYTAVEALAGSPTPLVAHLFGQIDFGIPPVYLWVAAAFKHLLSPWAADPYDAARFAGVFFAVVGLTSCGFAGFNFLGRHHGRSVVLILIGCIGLIPTVHFLNPAAAAFAAAGLVLHGYSLARRRVIAASFLLGTGWTLMSLAAAYPAAFALMLPLPVLMFFRPWQSRRLMLTAVASLAFALPLMTVYPLLLAKTQPALFAQWLDDHVFGTFGGVRHIQTAFSLFYYLKNLLWFALPALPLAVWTVCRTRLFSTDWGILGVVWMLAVLVLLAVNPQRFQDNLVWLLPPLALFGAAQLDSLRRGAAAFVNWFGIMAFGLFAVFLWTGFFAMNYGWPAKLAERAAYFSPYYVPDIDPIPMAVAVLFTPLWLWAITRKNIRGRQAVTNWAAGVTLTWALLMTLFLPWLDAAKSHAPVVRSMEASLSPELKRELSDGIECIDIGGGDLHTRIVWTQYGTLPHRVGDVQCRYRIVRLPQNADAPQGWQTVWQGARPRNKDSKFALIRKTGENILKTTD

SEQ ID NO: 300 - protein, 585 aa, Neisseria
MPSEAVSARPLCEYLLHLAIRPFLLTLMLTYTPPDARPPAKTHEKPWLLLLMAFAWLWPGVFSHDLWNPAEPAVYTAVEALAGSPTPLVAHLFGQTDFGIPPVYLWVAAAFKHLLSPWAAHPYDAARFAGVFFAVIGLTSCGFAGFNFLGRHHGRSVVLIHIGCIGLIPVAHFFNPAAAAFAAAGLVLHGYSLARRRVIAASFLLGTGWTLMSLAAAYPAAFALMLPLPVLMFFRPWQSRRLMLTAVASLAFALPLMTVYPLLLAKTQPALFAQWLNYHVFGTFGGVRHIQRAFSLFHYLKNLLWFAPPGLPLAVWTVCRTRLFSTDWGILGIVWMLAVLVLLAFNPQRFQDNLVWLLPPLALFGAAQLDSLRRGAAAFVNWFGIMAFGLFAVFLWTGFFAMNYGWPAKLAERAAYFSPYYVPDIDPIPMAVAVLFTPLWLWAITRKNIRGRQAVTNWAAGVTLTWALLMTLFLPWLDAAKSHAPVVRSMEASFSPELKRELSDGIECIGIGGGDLHTRIVWTQYGTLPHRVGDVRCRYRIVRLPQNADAPQGWQTVWQGARPRNKDSKFALIRKIGENILKTTD

SEQ ID NO: 301 - protein, 558 aa, Neisseria
MLTYTPPDARPPAKTHEKPWLLLLMAFAWLWPGVFSHDLWNPAEPAVYTAVEALAGSPTPLVAHLFGQTDFGIPPVYLWVAAAFKHLLSPWAADPYDAARFAGVFFAVIGLTSCGFAGFNFLGRHHGRSVVLIHIGCIGLIPVAHFLNPAAAAFAAAGLVLHGYSLARRRVIAASFLLGTGWTLMSLAAAYPAAFALMLPLPVLMFFRPWQSRRLMLTAVASLAFALPLMTVYPLLLAKTQPALFAQWLNYHVFGTFGGVRHIQRAFSLFHYLKNLLWFAPPGLPLAVWTVCRTRLFSTDWGILGIVWMLAVLVLLAFNPQRFQDNLVWLLPPLALFGAAQLDSLRRGAAAFVNWFGIMAFGLFAVFLWTGFFAMNYGWPAKLAERAAYFSPYYVPDIDPIPMAVAVLFTPLWLWAITRKNIRGRQAVTNWAAGVTLTWALLMTLFLPWLDAAKSHAPVVRSMEASFSPELKRELSDGIECIGIGGGDLHTRIVWTQYGTLPHRVGDVRCRYRIVRLPQNADAPQGWQTVWQGARPRNKDSKFALIRKIGENILKTTD

SEQ ID NO: 302 - protein, 59 aa, Neisseria
QSAKWLSGQTLVGTAIGIRGQIKLGGNLHYDIFTGRALKKPEFFQSRKWASGFQVGYTF

SEQ ID NO: 303 - protein, 342 aa, Neisseria
MDNSGSEATGKYQGNITFSADNPLGLSDMFYVNYGRSIGGTPDEESFDGHRKEGGSNNYAVHYSAPFGKWTWAFNHNGYRYHQAVSGLSEVYDYNGKSYNTDFGFNRLLYRDAKRKTYLGVKLWMRETKSYIDDAELTVQRRKTAGWLAELSHKEYIGRSTADFKLKYKRGTGMKDALRAPEEAFGEGTSRMKIWTASADVNTPFQIGKQLFAYDTSVHAQWNKTPLTSQDKLAIGGHHTVRGFDGEMSLSAERGWYWRNDLSWQFKPGHQLYLGADVGHVSGQSAKWLSGQTLVGTAIGIRGQIKLGGNLHYDIFTGRALKKPEFFQSRKWASGFQVGYTF

SEQ ID NO: 304 - protein, 342 aa, Neisseria
MDNSGSEATGKYQGNITFSADNPFGLSDMFYVNYGRSIGGTPDEENFDGHRKEGGSNNYAVHYSAPFGKWTWAFNHNGYRYHQAVSGLSEVYDYNGKSYNTDFGFNRLLYRDAKRKTYLSVKLWTRETKSYIDDAELTVQRRKTTGWLAELSHKGYIGRSTADFKLKYKHGTGMKDALRAPEEAFGEGTSRMKIWTASADVNTPFQIGKQLFAYDTSVHAQWNKTPLTSQDKLAIGGHHTVRGFDGEMSLPAERGWYWRNDLSWQFKPGHQLYLGADVGHVSGQSAKWLSGQTLAGTAIGIRGQIKLGGNLHYDIFTGRALKKPEYFQTKKWVTGFQVGYSF

SEQ ID NO: 305 - protein, 110 aa, Neisseria
  VARIANT (1)...(110): Xaa = Any Amino Acid
MRTKWSAVRSCTWADTADIDTALNLLYRLQKLEFLYGDENGHSDGINLXDEQLPLLMEQLSGSGKALLVDRNGLYLANANFHHEAAEELGLLAAEVAQMEKKYRLLIKNN

SEQ ID NO: 306 - protein, 214 aa, Neisseria
MESTLSLQANLYPRLTPAGAFYAVSSDAPSAGKTLLHSLLKADADEMVSSEKLLTWADTADIDTALNLLYRLQKLEFLYGDENGHSDGINLSDEQLPLLMEQLSGSGKALLVDRNGLYLANANFHHEAAEELGLLAAEVAQMEKKYRLLIKNNLYINNNAWGVCDPSGQSELTFFPLYIGSTKFILVIGGIPDLGKEAFVTLVRILYRRYSNRV

SEQ ID NO: 307 - protein, 227 aa, Neisseria
  VARIANT (1)...(227): Xaa = Any Amino Acid
MESTXSLQANLYXRLTPAGAFYAVSSDXPSAGKTLLHSLLKADADEMVSSEKLLTWAXTADIDTALNLLYRLQKLEFLYGDENGHSDGINLSDEQLPLLMEQLSGSGKALLVDRNGLYLANANFHHEAAEELGLLAAEVAQMEKKYRLXIKNNLYINNNAWGVCDPSGQSELTFFPLYIGSTKFILVIGGIPDLGKEAFVTLVRXLYXXLQQPRVKLGREXGLCSNY

SEQ ID NO: 308 - protein, 298 aa, Neisseria
MRTKWSAVRSCSRADTADIDTALNLLYRLQKLEFLYGDENGHSDGINLSDEQLPLLMEQLSGSGKALLVDRNGLYLANANFHHESAEELGLLAAEVAQMEKKYRLLIRNNLYINNNAWGVCDPSGQSELTFFPLYIGSTKFILVIAGIPDLSKGGICYFGKDFIPPLQQPRVKLGTGGIMRQLLISILEDLNNTSTDIIASAVISTDGLPMATMLPSHLNSDRVGAISATLLALGSRSVQELACGELEQVMIKGKSGYILLSQAGKDAVLVLVAKETGRLGLILLDAKRAARHIAEAI

SEQ ID NO: 309 - protein, 213 aa, Neisseria
MESTLSLQANLYPCLTPAGAFYAVSSDAPSAGKTLLRSLLKADADEVVSSEKLLAADTADIDTALNLLYRLQKLEFLYGDENGHSDGINLSDEQLPLLMEQLSGSGKALLVDRNGLYLANANFHHESAEELGLLAAEVAQMEKKYRLLIRNNLYINNNAWGVCDPSGQSELTFFPLYIGSTKFILVIAGIPDLSKEAFVTLVRILYRRYSNRV

SEQ ID NO: 310 - protein, 136 aa, Neisseria
  VARIANT (1)...(136): Xaa = Any Amino Acid
MTFLQRLQGLADNKICAFAWFVVRRFDEERVPQXAASMTFTTLLALVPVLTVMVAVASIFPVFDRWSDSFVSFVNQTIVPXGADMVFDYINAFREQANRLTAIGSVMLVVTSLMLIRTIDNTFNRIWRVXXQRPWM

SEQ ID NO: 311 - protein, 406 aa, Neisseria
MTFLQRLQGLADNKICAFAWFVVRRFDEERVPQAAASMTFTTLLALVPVLTVMVAVASIFPVFDRWSDSFVSFVNQTIVPQGADMVFDYINAFREQANRLTAIGSVMLVVTSLMLIRTIDNTFNRIWRVNSQRPWMMQFLVYWALLTFGPLSLGVGISFMVGSVQDAALASGAPQWSGALRTAATLTFMTLLLWGLYRFVPNRFVPARQAFVGALATAFCLETARSLFTWYMGNFDGYRSIYGAFAAVPFFLLWLNLLWTLVLGGAVLTSSLSYWQGEAFRRGFDSRGRFDDVLKILLLLDAAQKEGKALPVQEFRRHINMGYDELGELLEKLARHGYIYSGRQGWVLKTGADSIELNELFKLFVYRPLPVERDHVNQAVDAVMTPCLQTLNMTLAEFDAQAKKRQ

SEQ ID NO: 312 - protein, 408 aa, Neisseria
  VARIANT (1)...(408): Xaa = Any Amino Acid
MTFLQRLQGLADNKICAFAWFVVRRFDEERVPQAAASMTFTTLLALVPVLTVMVAVASIFPVFDRWSDSFVSFVNQTIVPQGADMVFDYINAFREQANRLTAIGSVMLVVTSXMLIRTIDNTFNRIWRVNSQRPWMMQFLVYWALLTFGPLSLGVGISFXVGSVQDAALASGAPQWSGALRTAATLXFMTLLLWGLYRXVPNRFVPARXAFVGALATAFCLETARSLFTWYMGNFDGYRSIYGAFAAVPFFLLWLNLLWTLVLGGAVLTSSLSYWQGEAFRRXFDSRGRFDDVLKILLLLDAAQKEGXALPVQEFRRHINMGYDELGELLEKLARHGYIYSGRQGWVLKTGADSIELNELFKLFVYRPLPVERDHVNQAVDAVMMPCLQTLNMTLAEFDAQAKKQQQS

SEQ ID NO: 313 - protein, 408 aa, Neisseria
MTFLQCWQGSADNKICAFAWFVIRRFSEERVPQAAASMTFTTLLALVPVLTVMVAVASIFPVFDRWSDSFVSFVNQTIVPQGADMVFDYIDAFRDQANRLTAIGSVMLVVTSLMLIRTIDNAFNRIWRVNTQRPWMMQFLVYWALLTFGPLSLGVGISFMVGSVQDSVLSSGAQQWADALKTAARLAFMTLLLWGLYRFVPNRFVPARQAFVGALITAFCLETARFLFTWYMGNFDGYRSIYGAFAAVPFFLLWLNLLWTLVLGGAVLTSSLSYWQGEAFRRGFDSRGRFDDVLKILLLLDAAQKEGRTLSVQEFRRHINMGYDELGELLEKLARYGYIYSGRQGWVLKTGADSIELSELFKLFVYRPLPVERDHVNQAVDAVMTPCLQTLNMTLAEFDAQAKKQQQS

SEQ ID NO: 314 - protein, 408 aa, Neisseria
MTFLQRWQGLADNKICAFAWFVIRRFSEERVPQAAASMTFTTLLALVPVLTVMVAVASIFPVFDRWSDSFVSFVNQTIVPQGADMVFDYIDAFRDQANRLTAIGSVMLVVTSLMLIRTIDNAFNRIWRVNTQRPWMMQFLVYWALLTFGPLSLGVGISFMVGSVQDSVLSSGAQQWADALKTAARLAFMTLLLWGLYRFVPNRFVPARQAFVGALITAFCLETARFLFTWYMGNFDGYRSIYGAFAAVPFFLLWLNLLWTLVLGGAVLTSSLSYWQGEAFRRGFDSRGRFDDVLKILLLLDAAQKEGRTLSVQEFRRHINMGYDELGELLEKLARYGYIYSGRQGWVLKTGADSIELSELFKLFVYRPLPVERDHVNQAVDAVMTPCLQTLNMTLAEFDAQAKKQQQS

SEQ ID NO: 315 - protein, 75 aa, Neisseria
RHARRIRIDTAINPELEALAEHLHYQWQGFLWLSTDMRQEISALVILLQRTRRKWLDAHERQHLRQSLLETREHG

SEQ ID NO: 316 - protein, 375 aa, Neisseria
MNTSQRNRLVSRWLNSYERYRYRRLIHAVRLGGAVLFATASARLLHLQHGEWIGMTVFVVLGMLQFQGAIYSKAVERMLGTVIGLGAGLGVLWLNQHYFHGNLLFYLTVGTASALAGWAAVGKNGYVPMLAGLTMCMLIGDNGSEWLDSGLMRAMNVLIGAAIAIAAAKLLPLKSTLMWRFMLADNLADCSKMIAEISNGRRMTRERLEENMAKMRQINARMVKSRSHLAATSGESRISPAMMEAMQHAHRKIVNTTELLLTTAAKLQSPKLNGSEIRLLDRHFTLLQTDLQQTVALINGRHARRIRIDTAINPELEALAEHLHYQWQGFLWLSTNMRQEISALVILLQRTRRKWLDAHERQHLRQSLLETREHG

SEQ ID NO: 317 - protein, 375 aa, Neisseria
MNTSQRNRLVSRWLNSYERYRYRRLIHAVRLGGAVLFATASARLLHLQHGEWIGMTVFVVLGMLQFQGAIYSKAVERMLGTVIGLGAGLGVLWLNQHYFHGNLLFYLTVGTASALAGWAAVGKNGYVPMLAGLTMCMLIGDNGSEWFDSGLMRAMNVLIGAAIAIAAAKLLPLKSTLMWRFMLADNLTDCSKMIAEISNGRRMTRERLEENMAKMRQINARMVKSRSHLAATSGESRISPAMMEAMQHAHRKIVNTTELLLTTAAKLQSPKLNGSEIRLLDRHFTLLQTDLQQTVALINGRHARRIRIDTAINPELEALAEHLHYQWQGFLWLSTNMRQEISALVILLQRTRRKWLDAHERQHLRQSLLETREHS

SEQ ID NO: 318 - protein, 409 aa, Neisseria
MSGVRFPSPAPIPSTDPPSGSLCFFTFPLQTASDMNSSQRKRLSGRWLNSYERYRHRRLIHAVRLGGTVLFATALARLLHLQHGEWIGMTVFVVLGMLQFQGAIYSNAVERMLGTVIGLGAGLGVLWLNQHYFHGNLLFYLTIGTASALAGWAAVGKNGYVPMLAGLTMCMLIGDNGSEWLDSGLMRAMNVLIGAAIAIAAAKLLPLKSTLMWRFMLADNLADCSKMIAEISNGRRMTRERLEQNMVKMRQINARMVKSRSHLAATSGESRISPSMMEAMQHAHRKIVNTTELLLTTAAKLQSPKLNGSEIRLLDRHFTLLQTDLQQTAALINGRHARRIRIDTAINPELEALAEHLHYQWQGFLWLSTNMRQEISALVIPLQRTRRKWLDAHERQHLRQSLLETREHG

SEQ ID NO: 319 - protein, 375 aa, Neisseria
MNSSQRKRLSGRWLNSYERYRHRRLIHAVRLGGTVLFATALARLLHLQHGEWIGMTVFVVLGMLQFQGAIYSNAVERMLGTVIGLGAGLGVLWLNQHYFHGNLLFYLTIGTASALAGWAAVGKNGYVPMLAGLTMCMLIGDNGSEWLDSGLMRAMNVLIGAAIAIAAAKLLPLKSTLMWRFMLADNLADCSKMIAEISNGRRMTRERLEQNMVKMRQINARMVKSRSHLAATSGESRISPSMMEAMQHAHRKIVNTTELLLTTAAKLQSPKLNGSEIRLLDRHFTLLQTDLQQTAALINGRHARRIRIDTAINPELEALAEHLHYQWQGFLWLSTNMRQEISALVILLQRTRRKWLDAHERQHLRQSLLETREHG

SEQ ID NO: 320 - protein, 237 aa, Neisseria
  VARIANT (1)...(237): Xaa = Any Amino Acid
AEDTRVTAQLLSAYGIQGKLVSVREHNERQMADKIVGYLSDGMVVAQVSDAGTPAVCDPGAKLARRVREAGFKVVPVVGAXAVMAALSVAGVEGSDFYFNGFVPPKSGERRKLFAKWVRAAFPIVMFETPHRIGAALADMAELFPERRLMLAREITKTFETFLSGTVGEIQTALSADGDQSRGEMVLVLYPAQDEKHEGLSESAQNIMKILTAELPTKQAAELAAKITGEGKKALYD

SEQ ID NO: 321 - protein, 291 aa, Neisseria; identical to SEQ ID NO: 144

SEQ ID NO: 322 - protein, 300 aa, Neisseria; identical to SEQ ID NO: 146

SEQ ID NO: 323 - protein, 291 aa, Neisseria; identical to SEQ ID NO: 147

SEQ ID NO: 324 - protein, 1450 aa, Neisseria
  VARIANT (1)...(1450): Xaa = Any Amino Acid
MKTTDKRTTETHRKAPKTGRIRFXAAYLAICLSFGILPQAWAGHTYFGINYQYYRDFAENKGKFAVGAKDIEVYNKKGELVGKSMTKAPMIDFSVVSRNGVAALVGVQYIVSVAHNGGYNNVDFGAEGXNIXDQXRXTYKIVKRNNYKAGTKGHPYGGDYHMPRLHKXVTDAEPVEMTSYMDGRKYIDQNNYPDRVRIGAGRQYWRSDEDEPNNRESSYHIASXXXXXXXXXXXXXXXGSPMFIYDAQKQKWLINGVLQTGNPYIGKSNGFQLVRKDWFYDEIFAGDTHSVFYEPRQNGKYSFNDDNNGTGKINAKHEHNSLPNRLKTRTVQLFNVSLSETAREPVYHAAGGVNSYRPRLNNGENISFIDEGKGELILTSNINQGAGGLYFQGDFTVSPENNETWQGAGVHISEDSTVTWKVNGVANDRLSKIGKGTLXXXXXXXXXXXXXXXXXXXXXXXXXXXXXXXXXXXXXXXXXXXXXXXXXXXXXXXXXXXXXXXXXXXXXXXXXXXXXXXXXXXXXXXXXXXXXXXXXXXXXXXXXXXXXXXXXXXXXXXXXXXXXXXXXXXXXXXXXXXXXXXXXXXXXXXXXXXXXXXXXXXXXXXXXXXXXXXXXXXXXXXXXXXXXXXXXXXXXXXXXXXXXXXXXXXXXXXXXXXXXXXXXXXXXXXXXXXXXXXXXXXXXXXXXXXXXXXXXXXXXXXXXXXXXXXXXXXXDKVTASLTKTDISGNVDLADHAHLNLTGLATLNGNLSANGDTRYTVSHNATQNGNXSLVXNAQATFNQATLNGNTSASGNASFNLSDHAVQNGSLTLSGNAKANVSHSALNGNVSLADKAVFHFESSRFTGQISGGKDTALHLKDSEWTLPSGXELGNLNLDNATITLNSAYRHDAAGAQTGSATDAPRRRSRRSRRSLLXVTPPTSVESRFNTLTVNGKLNGQGTFRFMSELFGYRSDKLKLAESSEGTYTLAVNNTGNEPASLEQLTVVEGKDNKPLSENLNFTLQNEHVDAGAWXXXXXXXXXXXXXXXXXXXXXXXXXXXXXXXXXXXXXXXXXXXXXXXXXXXXXXXXXXXXXXXXXXXXXXXXXXXXXXXXXXXXXXXXXXXXXXXXXXXXXXXXXXXXXXXXXXXXXXXXXXXXXXXXXXXXXXXXXXXXXXXXXXXXXXXXXXXXXXXXXXXXXXXXXXXXXXXXXXXXLDRVFAEDRRNAVWTSGIRDTKHYRSQDFRAYRQQTDLRQIGMQKNLGSGRVGILFSHNRTENTFDDGIGNSARLAHGAVFGQYGIDRFYIGISAGAGFSSGSLSDGIGXKXRRRVLHYGIQARYRAGFGGFGIEPHIGATRYFVQKADYRYENVNIATPGLAFNRYRAGIKADYSFKPAQHISITPYLSLSYTDAASGKVRTRVNTAVLAQDFGKTRSAEWGVNAEIKGFTLSLHAAAAKGPQLEAQHSAGIKLGYRW

SEQ ID NO: 325 - protein, 1457 aa, Neisseria
MKTTDKRTTETHRKAPKTGRIRFSPAYLAICLSFGILPQAWAGHTYFGINYQYYRDFAENKGKFAVGAKDIEVYNKKGELVGKSMTKAPMIDFSVVSRNGVAALVGDQYIVSVAHNGGYNNVDFGAEGRNPDQHRFTYKIVKRNNYKAGTKGHPYGGDYHMPRLHKFVTDAEPVEMTSYMDGRKYIDQNNYPDRVRIGAGRQYWRSDEDEPNNRESSYHIASAYSWLVGGNTFAQNGSGGGTVNLGSEKIKHSPYGFLPTGGSFGDSGSPMFIYDAQKQKWLINGVLQTGNPYIGKSNGFQLVRKDWFYDEIFAGDTHSVFYEPRQNGKYSFNDDNNGTGKINAKHEHNSLPNRLKTRTVQLFNVSLSETAREPVYHAAGGVNSYRPRLNNGENISFIDEGKGELILTSNINQGAGGLYFQGDFTVSPENNETWQGAGVHISEDSTVTWKVNGVANDRLSKIGKGTLHVQAKGENQGSISVGDGTVILDQQADDKGKKQAFSEIGLVSGRGTVQLNADNQFNPDKLYFGFRGGRLDLNGHSLSFHRIQNTDEGAMIVNHNQDKESTVTITGNKDIATTGNNNSLDSKKEIAYNGWFGEKDTTKTNGRLNLVYQPAAEDRTLLLSGGTNLNGNITQTNGKLFFSGRPTPHAYNHLNDHWSQKEGIPRGEIVWDNDWINRTFKAENFQIKGGQAVVSRNVAKVKGDWHLSNHAQAVFGVAPHQSHTICTRSDWTGLTNCVEKTITDDKVIASLTKTDISGNVDLADHAHLNLTGLATLNGNLSANGDTRYTVSHNATQNGNLSLVGNAQATFNQATLNGNTSASGNASFNLSDHAVQNGSLTLSGNAKANVSHSALNGNVSLADKAVFHFESSRFTGQISGGKDTALHLKDSEWTLPSGTELGNLNLDNATITLNSAYRHDAAGAQTGSATDAPRRRSRRSRRSLLSVTPPTSVESRFNTLTVNGKLNGQGTFRFMSELFGYRSDKLKLAESSEGTYTLAVNNTGNEPASLEQLTVVEGKDNKPLSENLNFTLQNEHVDAGAWRYQLIRKDGEFRLHNPVKEQELSDKLGKAEAKKQAEKDNAQSLDALIAAGRDAVEKTESVAEPARQAGGENVGIMQAEEEKKRVQADKDTALAKQREAETRPATTAFPRARRARRDLPQLQPQPQPQPQRDLISRYANSGLSEFSATLNSVFAVQDELDRVFAEDRRNAVWTSGIRDTKHYRSQDFRAYRQQTDLRQIGMQKNLGSGRVGILFSHNRTENTFDDGIGNSARLAHGAVFGQYGIDRFYIGISAGAGFSSGSLSDGIGGKIRRRVLHYGIQARYRAGFGGFGIEPHIGATRYFVQKADYRYENVNIATPGLAFNRYRAGIKADYSFKPAQHISITPYLSLSYTDAASGKVRTRVNTAVLAQDFGKTRSAEWGVNAEIKGFTLSLHAAAAKGPQLEAQHSAGIKLGYRW

SEQ ID NO: 326 - protein, 1449 aa, Neisseria
  VARIANT (1)...(1449): Xaa = Any Amino Acid
MKTTDKRTTETHRKAPKTGRIRFSPAYLAICLSFGILPQAWAGHTYFGINYQYYRDFAENKGKFAVGAKDIEVYNKKGELVGKSMTKAPMIDFSVVSRNGVAALVGDQYIVSVAHNGGYNNVDFGAEGXNPDQHRFSYQIVKRNNYKPDNSHPYNGDXHMPRLHKFVTDAEPVEMTSDMRGNTYSDKEKYPERVRIGSGHHYWRYDDDKHGDLSYSGAWLIGGNTHMQGWGNNGVXSLSGDVRHANDYGPMPIAGAAGDSGSPMFIYDKTNNKWLLNGVLQTGYPYSGRENGFQLIRKDWFYDDIYRGDTHTVXFEPRSNGHFSFTSNNNGTGTVTETNEKVSNPKLKVQTVRLFDESLNETDKEPVYAAGGVNQYRPRLNNGENLSFIDYGNGKLILSNNINQGAGGLYFEGDFTVSPENNETWQGAGVHISEDSTVTWKVNGVANDRLSKIGKGTLHVQAKGENQGSISVGDGTVILDQQADDKGKKQAFSEIGLXSGRGTVQLNADNQFNPDKLYFGFRGGRLDLNGHSLSFHRIQNTDEGAMIXXHNATTTSTVTITGNESITQPSGKNINRLNYSKEIAYNGWFGEKDTTKTNGRLNLVYQPAAEDRTXLLSGGTNLNGNITQTNGKLFFSGRPTPHAYNHLGSGWSKMEGIPQGEIVWDNDWIXRTFKAENFHIQGGQAVISRNVAKVEGDXHLSNHAQAVFGVAPHQSHTICTRSDWTGLTNCVEXXITDDKVIASLTKTDXSGXVXLXXXXXXXLXGXAXLXGNLSANGDTRYTVSHNATQNGNLSLVGNAQATFNQATLNGNXSXSGNASFNLSNNAAQNGSLTLSDNAKANVSHSALNGNVSLADKAVFHFENSRFTGQLSGSKXTALHLKDSEWTLPSGTELGNLNLDNATITLNSAYRHDAAGAQTGXVSDTPRRRSRRSLLSVTPPTSVESRFNTLTVNGKLNXQGTFRFMSELFGYRSDKLKLAESSEGTYTLAVNNTGNEPVSLDQLTVVEGKDNKPLSENLNFTLQNEHVDAGAWRYQLIRKDGEFRLHNPVKEQELSDKLGKAEAKKQAEKDNAQSLDALIAAGRDAAEKTESVAEPARXAGGENVGIMQAEEEKKRVQADKDSALAKQREAETRPXTTAFPRARXARRDLPQPQPQPQPQPQPQRDLXSRYANSGLSEFSATLNSVFAVQDELDRVFAEDRRNAVWTSXIRXTKHYRSQDFRAYRQQTDLRQIGMQKNLGSGRVGILFSHNRTENXFDDGIGNSARLAHGAVFGQYGIGRFDIGISTGAGFSSGXLSDGIGGKIRRRVLHYGIQARYRAGFGGFGIEPYIGATRYFVQKADYRYENVNIATPGLAFNRYRAGIKADYSFKPAQHXSITPYXSLSYTDAASGKVRTRVNTAVLAQDFGKTRSAEWGVNAEIKGFTLSXHAAAAKGPQLEAQHSAGIKLGYRW

SEQ ID NO: 327 - protein, 1468 aa, Neisseria
MKTTDKRTTETHRKAPKTGRIRFSPAYLAICLSFGILPQARAGHTYFGINYQYYRDFAENKGKFAVGAKDIEVYNKKGELVGKSMTKAPMIDFSVVSRNGVAALAGDQYIVSVAHNGGYNNVDFGAEGSNPDQHRFSYQIVKRNNYKAGTNGHPYGGDYHMPRLHKFVTDAEPVEMTSYMDGWKYADLNKYPDRVRIGAGRQYWRSDEDEPNNRESSYHIASAYSWLVGGNTFAQNGSGGGTVNLGSEKIKHSPYGFLPTGGSFGDSGSPMFIYDAQKQKWLINGVLQTGNPYIGKSNGFQLVRKDWFYDEIFAGDTHSVFYEPHQNGKYFFNDNNNGAGKIDAKHKHYSLPYRLKTRTVQLFNVSLSETAREPVYHAAGGVNSYRPRLNNGENISFIDKGKGELILTSNINQGAGGLYFEGNFTVSPKNNETWQGAGVHISDGSTVTWKVNGVANDRLSKIGKGTLLVQAKGENQGSVSVGDGKVILDQQADDQGKKQAFSEIGLVSGRGTVQLNADNQFNPDKLYFGFRGGRLDLNGHSLSFHRIQNTDEGAMIVNHNQDKESTVTITGNKDITTTGNNNNLDSKKEIAYNGWFGEKDATKTNGGLNLNYPPEEADRTLLLSGGTNLNGNITQTNGKLFFSGRPTPHAYNHLGSGWSKMEGIPQGEIVWDNDWIDRTFKAENFHIQGGQAVVSRNVAKVEGDWHLSNHAQAVFGVAPHQSHTICTRSDWTGLTSCTEKTITDDKVIASLSKTDVRGNVSLADHAHLNLTGLATFNGNLVQAETRTIRLRANATQNGNLSLVGNAQATFNQATLNGNTSASDNASFNLSNNAVQNGSLTLSDNAKANVSHSALNGNVSLADKAVFHFENSRFTGKISGGKDTALHLKDSEWTLPSGTELGNLNLDNATITLNSAYRHDAAGAQTGSAADAPRRRSRRSLLSVTPPTSAESRFNTLTVNGKLNGQGTFRFMSELFGYRSGKLKLAESSEGTYTLAVNNTGNEPVSLEQLTVVEGKDNTPLSENLNFTLQNEHVDAGAWRYQLIRKDGEFRLHNPVKEQELSDKLGKAGETEAALTAKQAQLAAKQQAEKDNAQSLDALIAAGRNATEKAESVAEPARQAGGENAGIMQAEEEKKRVQADKDTALAKQREAETRPATTAFPRARRARRDLPQPQPQPQPQPQRDLISRYANSGLSEFSATLNSVFAVQDELDRVFAEDRRNAVWTSGIRDTKHYRSQDFRAYRQQTDLRQIGMQKNLGSGRVGILFSHNRTGNTFDDGIGNSARLAHGAVFGQYGIGRFDIGISAGAGFSSGSLSDGIRGKIRRRVLHYGIQARYRAGFGGFGIEPHIGATRYFVQKADYRYENVNIATPGLAFNRYRAGIKADYSFKPAQHISITPYLSLSYTDAASGKVRTRVNTAVLAQDFGKTRSAEWGVNAEIKGFTLSLHAAAAKGPQLEAQHSAGIKLGYRW

SEQ ID NO: 328 - protein, 140 aa, Neisseria
  VARIANT (1)...(140): Xaa = Any Amino Acid
KVWQFVEXPLRAVVPADSFEPTAQKLNLFKAGAATILFYEDQNVVKGLQEQFPAYAANFPVWADQANAMVQYAVWTTLAAVGVGANLQHYNPLPDAAIAKAWNIPENWLLRAQMVIGGIEGAAGEKTFEPVAERLKVFGA

SEQ ID NO: 329 - protein, 131 aa, Neisseria
LRAVVPADSFEPTAQKLNLFKAGAATILFYEDQNVVKGLQEQFPAYAANFPVWADQANAMVQYAVWTTLAAVGVGANLQHYNPLPDAAIAKAWNIPENWLLRAQMVIGGIEGAAGEKTFEPVAERLKVFGA

SEQ ID NO: 330 - protein, 201 aa, Neisseria
MTRQSLQQAAESRRSIYSLNKNLPVGKDEIVQIVEHAVLHTPSSFNSQSARVVVLFGEEHDKVWQFVEDALRAVVPADSFEPTAQKLNLFKAGAATILFYEDQNVVKGLQEQFPAYAANFPVWADQANAMVQYAVWTTLAAVGVGANLQHYNPLPDAAIAKAWNIPENWLLRAQMVIGGIEGAAGEKTFEPVAERLKVFGA

SEQ ID NO: 331 - protein, 174 aa, Neisseria
MAVASNVSLDMSNPTVLRMGLPLYIASLRRGAIYKVWQFVEDALRAVVPADSFEPTAQKLKLFKAGAATILFYEDQNVVKGLQEQFPAYAANFPVWADQANAMVQYAVWTTLAAVGAGANLQHYNPLPDVAIAKAWNIPENWLLRAQMVIGGIEGAAGEKVFEPVAERLKVFGA

SEQ ID NO: 332 - protein, 211 aa, Neisseria
  VARIANT (1)...(211): Xaa = Any Amino Acid
GYNYLFARGSRIANYQINGIPVADALADTGNANTAAYERVEVVRGVAGLLDGTGEPSATVNLVRKRLTRKPLFEVRAEAGNRKHFGLDADVSGSLNTEXXLRGRLVSTFGRGDSWRRRERSRXAELYGILEYDIAPQTRVHAXMDYQQAKETADAPLSYAVYDSQGYATAFGPKDNPATNWANSHHRALNLFAGIEHRFNQDWKLKAEYDY

SEQ ID NO: 333 - protein, 725 aa, Neisseria
MTRFKYSLLFAALLPVYAQADVSVSDDPKPQESTELPTITVTADRTASSNDGYTVSGTHTPLGLPMTLREIPQSVSVITSQQMRDQNIKTLDRALLQATGTSRQIYGSDRAGYNYLFARGSRIANYQINGIPVADALADTGNANTAAYERVEVVRGVAGLLDGTGEPSATVNLVRKRLTRKPLFEVRAEAGNRKHFGLDADVSGSLNTEGTLRGRLVSTFGRGDSWRRRERSRDAELYGILEYDIAPQTRVHAGMDYQQAKETADAPLSYAVYDSQGYATAFGPKDNPATNWANSRHRALNLFAGIEHRFNQDWKLKAEYDYTRSRFRQPYGVAGVLSIDHNTAATDLIPGYWHADPRTHSASVSLIGKYRLFGREHDLIAGINGYKYASNKYGERSIIPNAIPNAYEFSRTGAYPQPASFAQTIPQYGTRRQIGGYLATRFRAADNLSLILGGRYTRYRTGSYDSRTQGMTYVSANRFTPYTGIVFDLTGNLSLYGSYSSLFVPQSQKDEHGSYLKPVTGNNLEAGIKGEWLEGRLNASAAVYRARKNNLATAAGRDPSGNTYYRAANQAKTHGWEIEVGGRITPEWQIQAGYSQSKTRDQDGSRLNPDSVPERSFKLFTAYHFAPEAPSGWTIGAGVRWQSETHTDPATLRIPNPAAKARAADNSRQKAYAVADIMARYRFNPRAELSLNVDNLFNKHYRTQPDRHSYGALRTVNAAFTYRFK

SEQ ID NO: 334 - protein, 725 aa, Neisseria
MTRFKYSLLFAALLPVYAQADVSVSDDPKPQESTELPTITVTADRTASSNDGYTVSGTHTPLGLPMTLREIPQSVSVITSQQMRDQNIKALDRALLQATGTSRQIYGSDRAGYNYLFARGSRIANYQINGIPVADALADTGNANTAAYERVEVVRGVAGLLDGTGEPSATVNLVRKRPTRKPLFEVRAEAGNRKHFGLGADVSGSLNAEGTLRGRLVSTFGRGDSWRQRERSRDAELYGILEYDIAPQTRVHAGMDYQQAKETADAPLSYAVYDSQGYATAFGPKDNPATNWANSRHRALNLFAGIEHRFNQDWKLKAEYDYTRSRFRQPYGVAGVLSIDHNTAATDLIPGYWHADPRTHSASVSLIGKYRLFGREHDLIAGINGYKYASNKYGERSIIPNAIPNAYEFSRTGAYPQPASFAQTIPQYGTRRQIGGYLATRFRAADNLSLILGGRYSRYRTGSYDSRTQGMTYVSANRFTPYTGIVFDLTGNLSLYGSYSSLFVPQSQKDEHGSYLKPVTGNNLEAGIKGEWLEGRLNASAAVYRARKNNLATAAGRDPSGNTYYRAANQAKTHGWEIEVGGRITPEWQIQAGYSQSKTRDQDGSRLNPDSVPERSFKLFTAYHFAPEAPSGWTIGAGVRWQSETHTDPATLRIPNPAAKARAADNSRQKAYAVADIMARYRFNPRAELSLNVDNLFNKHYRTQPDRHSYGALRTVNAAFTYRFK

SEQ ID NO: 335 - protein, 623 aa, Neisseria
SAVDACRIPGYNYLFARGSRIANYQINGIPVADALADTGNANTAAYERVEVVRGVAGLPDGTGEPSATVNLVRKHPTRKPLFEVRAEAGNRKHFGLGADVSGSLNAEGTLRGRLVSTFGRGDSWRQLERSRDAELYGILEYDIAPQTRVHAGMDYQQAKETADAPLSYAVYDSQGYATAFGPKDNPATNWSNSRNRALNLFAGIEHRFNQDWKLKAEYDYTRSRFRQPYGVAGVLSIDHSTAATDLIPGYWHADPRTHSASMSLTGKYRLFGREHDLIAGINGYKYASNKYGERSIIPNAIPNAYEFSRTGAYPQPSSFAQTIPQYDTRRQIGGYLATRFRAADNLSLILGGRYSRYRAGSYNSRTQGMTYVSANRFTPYTGIVFDLTGNLSLYGSYSSLFVPQLQKDEHGSYLKPVTGNNLEADIKGEWLEGRLNASAAVYRARKNNLATAAGRDQSGNTYYRAANQAKTHGWEIEVGGRITPEWQIQAGYSQSKPRDQDGSRLNPDSVPERSFKLFTAYHLAPEAPSGRTIGAGVRRQGETHTDPAALRIPNPAAKARAVANSRQKAYAVADIMARYRFNPRTELSLNVDNLFNKHYRTQPDRHSYGALRTVNAAFTYRFK

SEQ ID NO: 336 - protein, 725 aa, Neisseria
MTRFKYSLLFAALLPVYAQADVSVSDDPKPQESTELPTITVTADRTASSNDGYTVSGTHTPFGLPMTLREIPQSVSVITSQQMRDQNIKTLDRALLQATGTSRQIYGSDRAGYNYLFARGSRIANYQINGIPVADALADTGNANTAAYERVEVVRGVAGLPDGTGEPSATVNLVRKHPTRKPLFEVRAEAGNRKHFGLGADVSGSLNAEGTLRGRLVSTFGRGDSWRQLERSRDAELYGILEYDIAPQTRVHAGMDYQQAKETADAPLSYAVYDSQGYATAFGPKDNPATNWSNSRNRALNLFAGIEHRFNQDWKLKAEYDYTRSRFRQPYGVAGVLSIDHSTAATDLIPGYWHADPRTHSASMSLTGKYRLFGREHDLIAGINGYKYASNKYGERSIIPNAIPNAYEFSRTGAYPQPSSFAQTIPQYDTRRQIGGYLATRFRAADNLSLILGGRYSRYRAGSYNSRTQGMTYVSANRFTPYTGIVFDLTGNLSLYGSYSSLFVPQLQKDEHGSYLKPVTGNNLEADIKGEWLEGRLNASAAVYRARKNNLATAAGRDQSGNTYYRAANQAKTHGWEIEVGGRITPEWQIQAGYSQSKPRDQDGSRLNPDSVPERSFKLFTAYHLAPEAPSGRTIGAGVRRQGETHTDPAALRIPNPAAKARAVANSRQKAYAVADIMARYRFNPRTELSLNVDNLFNKHYRTQPDRHSYGALRTVNAAFTYRFK

SEQ ID NO: 337 - protein, 122 aa, Neisseria
  VARIANT (1)...(122): Xaa = Any Amino Acid
MRTAVVLLLIMPMAASSAMMPEMVCAGVSPGTAIISKPTEQTAVMASSLSSVSTPASAAAIIPSSSETGINAPLKPPTALEAIMPPFFTASFSNAKAAVVPCVPQTLKPIXSRMRATXSPTG

SEQ ID NO: 338 - protein, 307 aa, Neisseria
  VARIANT (1)...(307): Xaa = Any Amino Acid
MRTAVVLLLIMPMAASSAMMPEMVCAGVSPGTAIISKPTEQTAVMASSLSSVSTPASAAAIIPSSSETGINAPLKPPTALEAIMPPFFTASFSNAKAAVVPCVPQTLKPISSRMRATESPTAGVGASDKSRIPNGIFSIFEASRPMSSPTRVILKAVFFTTSATSVNVVASEFSNAAFTTPGPDTPTLITASASPEPXNAPAINGLSSTALQNTTILAQPKPSGVISAVRLTVSPASLTASILIPARVLPILMELHTISVVFIASGMERINTSSEGDIPFCTNAEKPPIKDTPMALAALSKVCATLT

SEQ ID NO: 339 - protein, 307 aa, Neisseria
  VARIANT (1)...(307): Xaa = Any Amino Acid
MRTAVVLLLIMPMAASSAMMPEMVCAGVSPGTAIISXPTEQTAVIASSLSNVSTPASAAAIIPSSSXTGINAPLKPPTALEAIMPPFFTASFSNAKAAVVPCVPQTLKPISSRMRATESPTAGVGASDKSRIPNGIFSIFEASRPMSSPTRVILKAVFFTTSATSVNVVASEFSNAAFTTPGPDTPTLITASASPEPXNAPAIXGLSSXALQNTTILAQPKPSSVISXVRLMVSPASLTASILIPARVLPILMELHTISVVFIASGMERXNTSSEGDIPFCTSAEKPPIKDTPMALAALSKVCATLT

SEQ ID NO: 340 - protein, 307 aa, Neisseria
MRTAVVLLLIMPMAASSAMMPEMVCAGVSPGTAIMSKPTEQTAVMASSLSSVNTPASAAAIIPSSSETGINAPLKPPTALEAIMPPFFTASFSNAKAAVVPCVPQTLKPISSRMRATESPTAGVGASDKSRMPNGIFSIFEASRPMSSPTRVILKAVFFTTSATSVRLTASEFSSAALTTPGPDTPTLITASASPEPWNAPAINGLSSTALQNTTILAQPKPSGVISAVRLMVSPASLTASILIPARVLPILMELHTISVVFIASGTERINTSSEGDIPFCTSAEKPPIKDTPMALAALSKVCATLT

SEQ ID NO: 341 - protein, 60 aa, Neisseria
TDVQKELVGEQRKWAQEKISNCRQAAAQADRQEYAEYLKLQCDTRMTRERIQYLRGYSID

SEQ ID NO: 342 - protein, 338 aa, Neisseria
MYRKLIALPFALLLAACGREEPPKALECANPAVLQGIRGNIQETLTQEARSFAREDGRQFVDADKIIAAAYGLAFSLEHASETQEGGRTFCIADLNITVPSETLADAKANSPLLYGETALSDIVRQKTGGNVEFKDGVLTAAVRFLPVKDGQTAFVDNTVGMAAQTLSAALLPYGVKSIVMIDGKAVKKEDAVRILSGKAREEEPSKPTPEDILEHNAAGGDAGVPQAAEGAPEPEILHPDDGERADTVTVSRGEVEEARVQNQRAESEITKLWGGLDTDVQKELVGEQRKWAQEKISNCRQAAAQADRQEYAEYLKLQCDTRMTRERIQYLRGYSID

SEQ ID NO: 343 - protein, 338 aa, Neisseria
  VARIANT (1)...(338): Xaa = Any Amino Acid
MYRKLIALPFALLLAACGREEPPKALECANPAVLQXIRXNIQETLTQEARSFAREDXXQFVDADXIIAAAXXXXXSLEHASETQEGGRTFCXADLNITVPSETLADAKANSPLLYGETALSDIVRQKTGGNVEFKDGVLTAAVRFLPVKDGQXAFVDNTVGMAAQTLSAALLPYGVKSIVMIDGKAVKKEDAVRIXSXXAREXEPSKXXPEDILEHNAAGGDADVPQAGEDAPEPEILHPDDGERADTVTVSRGEVEEARVQNQRAESEITKLWGGLDTDVQKELVGEXRKWAQEKISNCRQAAAQADRQEYAEYLKLQCDTRMTRERIQYLRGYSID

SEQ ID NO: 344 - protein, 338 aa, Neisseria
MYRKLIALPFALLLAACGREEPPKALECANPAVLQDIRGSIQETLTQEARSFAREDGRQFVDADKIIAAAYGLAFSLEHASETQEGGRTFCIADLNITVPSETLADAEANSPLLYGETSLADIVQQKTGGNVEFKDGVLTAAVRFLPAKDARTAFIDNTVGMATQTLSAALLPYGVKSIVMIDGKAVTKEDAVRVLSGKAREEEPSKPTPEDILEHNAAGGDAGVPQAAEGAPEPEILHPDDVERADTVTVSRGEVEEARVQNQRAESEITKLWGGLDTDVQKELVGEQRKWAQEKISNCRQAAAQADRQEYAEYLKLQCDTRMTRERIQYLRGYSID

SEQ ID NO: 345 - protein, 502 aa, Neisseria
  VARIANT (1)...(502): Xaa = Any Amino Acid
MQLIDYSHSFFSVVPPFLALALAVITRRVLLSLGIGILXXVAFLVGGNPVDGLTHLKDMVVGLAWSDXDWSLGKPKILVFXILLGIFTSLLTYSGSNXXXXXXXXXXXXXXXXXXXXXXXXXXXXXXXXXXXXXXXXXXXXXXXXXXXXXXXXXXXXXXXXXXXXXXXXXXXXXXXXXXXXXXXXXXXXXXXXXXXXXXXXXXXXXXXXXXXXXXXXXXXXXXXXXXXXXXXXXXXXXXXXXXXXXXXXXXXXXXXXXXXXXXXXXXXXXXXXXXXXXXXXXXXXXXXXXXXXXXXTSLVFGGTCGVFAVVLCTLGTIKTADYPKAVWQGAKSMFGAIAILILAWLISTVVGEMHTGDYLSTLVAGNIHPGFLPVILFLLASVMAFATGTSWGTFGIMLPIAAAMAVKVEPALIIPCMSAVMAGAVCGDHCSPISDTTILSSTGARCNHIDHVTSQLPYALTVAAAAASGYLALGLTKSALLGFGTTGIVLAVLIFLLKDKK

SEQ ID NO: 346 - protein, 506 aa, Neisseria
MQLIDYSHSFFSVVPPFLALALAVITRRVLLSLGIGILVGVAFLVGGNPVDGLTHLKDMVVGLAWSDGDWSLGKPKILVFLILLGIFTSLLTYSGSNQAFADWAKRHIKNRRGAKMLTACLVFVTFIDDYFHSLAVGAIARPVTDKFKVSRTKLAYILDSTAAPMCVLMPVSSWGASIIATLAGLLVTYKITEYTPMGTFVAMSLMNYYALFALIMVFVVAWFSFDIGSMARFEQAALNEAHDETAVSDATKGRVYALIIPVLALIASTVSAMIYTGAQASETFSILGAFENTDVNTSLVFGGTCGVLAVVLCTLGTIKTADYPKAVWQGAKSMFGAIAILILAWLISTVVGEMHTGDYLSTLVAGNIHPGFLPVILFLLASVMAFATGTSWGTFGIMLPIAAAMAVKVEPALIIPCMSAVMAGAVCGDHCSPISDTTILSSTGARCNHIDHVTSQLPYALTVAAAAASGYLALGLTKSALLGFGTTGIVLAVLIFLLKDKKRANA

SEQ ID NO: 347 - protein, 506 aa, Neisseria
  VARIANT (1)...(506): Xaa = Any Amino Acid
MQLIDYSHSFFSVVPPFLALALAVITRRVLLSLGIGILVGVAFLVGGNPVDGLTHLKDMVVGLAWSDGDWSLGKPKXLVFLILLGIFTSLLTYSGSNQAFADWAKRHIKNRRGAKMLTACLVFVTFIDDYFHSLAVGAXARPVTDKFKVSRAKLAYILDSTAAPMCVLMPVSSWGASIIATLAGLLVTYKITEYTPMGTFVAMSLMNYYALFALIMVFVVAWFSFDIGSMARFEQAALNEAHDETAVSDGSWGRVYALIIPVLALIASTVSAMIYTGAQASETFSILGAFENTDVNTSLVFGGTCGVLAVVLCTLGTIKIADYPKAVWQGAKSMFGAIAILILAWLISTVVGEMHTGDYLSTLVAGNIHPGFLXVILFLLASVMAFATGTSWGTFGIMLPIAAAMAVKVDPSLIIPCMSAVMAGAVCGDHCSPISDTTILSSTGARCNHIDHVTSQLPYALTVAAAAASGYLALGLTKSALLGFGXTGIVLAVLIFLLKDKKRANA

SEQ ID NO: 348 - protein, 506 aa, Neisseria
MQLIDYSHSFFSVVPPFLALALAVITRRVLLSLGIGILVGVAFLVGGNPVDGLTHLKDMVVGLAWADGDWSLGKPKILVFLILLGIFTSLLTYSGSNQAFADWAKRHIKNRCGAKMLTACLVFVTFIDDYFHSLAVGAIARPVTDKFKVSRAKLAYILDSTASPMCVLMPVSSWGASIIATLAGLLVTYKITEYTPMGTFVAMSLMNYYALFALIMVFVVAWFSFDIGSMARFEQAALNEAQDETAASDATKGRVYALIIPVLALIASTVSAMIYTGAQASETFSILGAFENTDVNTSLVFGGTCGVLAVVLCTFGTIKTADYPKAVWQGAKSMFGAIAILILAWLISTVVGEMHTGDYLSTLVAGNIHPGFLPVILFLLASVMAFATGTSWGTFGIMLPIAAAMAVKVEPALIIPCMSAVMAGAVCGDHCSPISDTTILSSTGARCNHIDHVTSQLPYALTVAAAAASGYLALGLTKSALLGFGTTGIVLAVLIFLLKDKKRADV

SEQ ID NO: 349 - protein, 82 aa, Neisseria
  VARIANT (1)...(82): Xaa = Any Amino Acid
KQWYADXSIKTEMVMVNDEPAKILTWDESGRLLSELSIRHHQRNGVVLEWYEDGSKKSEXVYQDDKLVRKTQWDKDGYLIEP

SEQ ID NO: 350 - protein, 245 aa, Neisseria
MKKLSRIVFSTVLLGFSAALPAQTYSVYFNQNGKLTATMSSAAYIRQYSVVAGIAHAQDFYYPSMKKYSEPYIVASTQIKSFVPTLQNGMLILWHFNGQKKMAGGFSKGKPDGEWVNWYPNGKKSAVMPYKNGLSEGTGYRYYRNGGKESEIQFKQNKANGVWKQWYADGSIKTEMVMVNDEPAKILTWDESGRLLSELSIRHHQRNGVVLEWYEDGSKKSEAVYQDDKLVRKTQWDKDGYLIEP

SEQ ID NO: 351 - protein, 245 aa, Neisseria
  VARIANT (1)...(245): Xaa = Any Amino Acid
MKKLSRIVFSTVLLGFSAALPAQXYSVYFNQNGKLTATXSSAAYIRQYSVAEGIAHAQXFXYPSMKKYSEPYIVASTQIKSFVPTLQNGMLILWHFXGQKKMAGGFSKGKPDGEWVNWYPNGKKSAVMPYKNGLSEGTGXRYYRNGGKESEIQFKQNKANGVWKQWYADGNIKTEMVMVNDEPAKILTWDESGRLLSELSIHHHXRNGVVLEWYEDGSKKXEAVYQDDKLVRKTQWDXDGYLIEP

SEQ ID NO: 352 - protein, 245 aa, Neisseria
MKKLSRIVFSIVLLGFSAALPAQTYSVYFNQNGKLTATMSSAAYIRQYSVAAGIAHAQDFYYPSMKKYSEPYIVASTQIKSFVPTLQNGMLILWHFNGQKKMAGGFSKGKPDGEWVNWYPNGKKSAVMPYKNGLSEGTGYRYYRNGGKESEIQFKQNKANGVWKQWYADGSIKTEMVMVNDEPAKILTWDESGRLLSELSIRHHKRNGVVLEWYEDGSKKSEAVYQDDKLVRKTQWDKDGYLIEP

SEQ ID NO: 353 - protein, 172 aa, Neisseria
  VARIANT (1)...(172): Xaa = Any Amino Acid
MKFTKHPVWAMAFRPFYSLAALYGALSVLLWGFGYTGTHXLSGFYWHAHEMIWGYAGLVVIAFLLTAVATWTGQPPTRGGVLVGLTIFWLAARIAAFIPGWGASASGILGTLFFWYGAVCMALPVIRSQNQRNYVAVFALFVLGGTHAAFHVQLHNGNLGGLLSGLQSGLVM

SEQ ID NO: 354 - protein, 384 aa, Neisseria
MKFTKHPVWAMAFRPFYSLAALYGALSVLLWGFGYTGTHELSGFYWHAHEMIWGYAGLVVIAFLLTAVATWTGQPPTRGGVLVGLTIFWLAARIAAFIPGWGASASGILGTLFFWYGAVCMALPVIRSQNQRNYVAVFALFVLGGTHAAFHVQLHNGNLGGLLSGLQSGLVMVSGFIGLIGTRIISFFTSKRLNVPQIPSPKWVAQASLWLPMLTAMLMAHGVLAWLSAVFAFAAGVIFTVQVYRWWYKPVLKEPMLWILFAGYLFTGLGLIAVGASYFKPAFLNLGVHLIGVGGIGVLTLGMMARTALGHTGNPIYPPPKAVPVAFWLMMAATAVRMVAVFSSGTAYTHSIRTSSVLFALALLVYAWKYIPWLIRPRSDGRPG

SEQ ID NO: 355 - protein, 384 aa, Neisseria
MKFTKHPVWAMAFRPFYSLAALYGALSVLLWGFGYTGTHELSGFYWHAHEMIWGYAGLVVIAFLLTAVATWTGQPPTRGGVLVGLTIFWLAARIAAFIPGWGASASGILGTLFFWYGAVCMALPVIRSQNQRNYVAVFALFVLGGTHAAFHVQLHNGNLGGLLSGLQSGLVMVSGFIGLIGTRIISFFTSKRLNVPQIPSPKWVAQASLWLPMLTAMLMAHGVMPWLSAAFAFAAGVIFTVQVYRWWYKPVLKEPMLWILFAGYLFTGLGLIAVGASYFKPAFLNLGVHLIGVGGIGVLTLGMMARTALGHTGNPIYPPPKAVPVAFWLMMAATAVRMVAVFSSGTAYTHSIRTSSVLFALALLVYAWKYIPWLIRPRSDGRPG

SEQ ID NO: 356 - protein, 271 aa, Neisseria
MKFTKHPVWAMAFRPFYSLAALYGALSVLLWGFGYTGTHELSGFYWHAHEMIWGYAGLVVIAFLLTAVATWTGQPPTRGGVLVGLTAFWLAARIAAFIPGWGAAASGILGTLFFWYGAVCMALPVIRSQNRRNYVAVFAIFVLGGTHAAFHVQLHNGNLGGLLSGLQSGLVMVWGFIGLIGMKIISFFTSKRLKLPQIPSPKWVAHASLWLPMLNAILMAHRVMPWLSAAFPFAAGVIFTVQVYAGGITPIEETSCGSVAGICYRLGNSSG

SEQ ID NO: 357 - protein, 384 aa, Neisseria
MKFTKHPVWAMAFRPFYSLAALYGALSVLLWGFGYTGTHELSGFYWHAHEMIWGYAGLVVIAFLLTAVATWTGQPPTRGGVLVGLTAFWLAARIAAFIPGWGAAASGILGTLFFWYGAVCMALPVIRSQNRRNYVAVFAIFVLGGTHAAFHVQLHNGNLGGLLSGLQSGLVMVSGFIGLIGMRIISFFTSKRLNVPQIPSPKWVAQASLWLPMLTAILMAHGVMPWLSAAFAFAAGVIFTVQVYRWWYKPVLKEPMLWILFAGYLFTGLGLIAVGASYFKPAFLNLGVHLIGVGGIGVLTLGMMARTALGHTGNSIYPPPKAVPVAFWLMMAATAVRMVAVFSSGTAYTHSIRTSSVLFALALLVYAWKYIPWLIRPRSDGRPG

SEQ ID NO: 358 - protein, 190 aa, Neisseria
  VARIANT (1)...(190): Xaa = Any Amino Acid
MPSEGSDGXGXGEXEXVAHAQXDFVGFEAGVFQASPVVVTVSGVXXQLGXDVETDTGDDTKTXAADXVAFVIGRFXGXXLYXXAXXXXAXXWXXXXSRGFXXHRMNLMFNVSVGDARADIGFEFIVEFEIVNGGQAERRNGVEAAVSLMFCLGFFVVVVYLFSNFFSRRITFFPFSVTGIICRYSPAAEI

SEQ ID NO: 359 - protein, 360 aa, Neisseria
MPSETVGSIVNVGVDESVGFSPPFPSIQHFYRFHRIHRIRLFRPPGPMQLNRHSHGSGNLGRGVWATVLSDKFPCGQVRIPACAGMTNFEIAVLSGMTVRVFYCARPAPVNGGRLKMPSEGSDGIGIGESEAVAHAQRGFVGFEAGVFQASPVVVAVAGVQGQAGRDVYAHARHRAEAQAAAAVAFLIGVFLRMSVRINRNCCVSITRVGGKSTCYFFSRIDAVSDVSVGDARTDIGFEFVVEFEIVNGGQAERRNGVECAVFLMFRLLVFYVKLVAAKSFIILSFQLFYVHGIFIVVPFPVTGIIRGDAPAAEVVADRHPGVDGMRTDVSEIIAYRAYFVFAWSGWFRIIVGNAFGGVG

SEQ ID NO: 360 - protein, 145 aa, Neisseria
  VARIANT (1)...(145): Xaa = Any Amino Acid
MFAFLEAFFVEYGYAAVFFVLVICGFGVPIPEDLTLVTGGVISGMGYTNPHIMFAVGMLGVLVGDGIMFAAGRIWGQXXLXFXPIAXIMTPXRYEQVQEKFDKYGNWVLFVARFLPGLRTAVFVTAGISRKVSYLRFIIMDGLAA

SEQ ID NO: 361 - protein, 227 aa, Neisseria
MFAFLEAFFVEYGYAAVFFVLVICGFGVPIPEDLTLVTGGVISGMGYTNPHIMFAVGMLGVLVGDGIMFAAGRIWGQKILRFKPIARIMTPKRYEQVQEKFDKYGNWVLFVARFLPGLRTAVFVTAGISRKVSYLRFIIMDGLAALISVPIWIYLGEYGAHNIDWLMAKMHSLQSGIFVILGIGATVVAWIWWKKRQRIQFYRSKLKEKRAQRKAAKAAKKAAQSKQ

SEQ ID NO: 362 - protein, 227 aa, Neisseria
MFALLEAFFVEYGYAAVFFVLVICGFGVPIPEDLTLVTGGVISGMGYTNPHIMFAVGMLGVLVGDGIMFAAGRIWGQKILKFKPIARIMTPKRYAQVQEKFDKYGNWVLFVARFLPGLRTAVFVTAGISRKVSYLRFLIMDGLAALISVPVWIYLGEYGAHNIDWLMAKMHSLQSGIFIALGVLAAALAWFWWRKRRHYQLYRAQLSEKRAKRKAEKAAKKAAQKQQ

SEQ ID NO: 363 - protein, 122 aa, Neisseria
YPVLFVARFLPGLRTAVFVTAGISRKVSYLRFLIMDGLAALISVPVWIYLGEYGAHNIDWLMAKMHSLQSGIFIALGVLAAALAWFWWRKRRHYQLYRAQLSEKRAKRKAEKAAKKAAQKQQ

SEQ ID NO: 364 - protein, 227 aa, Neisseria
MFALLEAFFVEYGYAAVFFVLVICGFGVPIPEDLTLVTGGVISGMGYTNPHIMFAVGMLGVLAGDGVMFAAGRIWGQKILKFKPIARIMTPKRYAQVQEKFDKYGNWVLFVARFLPGLRTAVFVTAGISRKVSYLRFLIMDGLAALISVPVWIYLGEYGAHNIDWLMAKMHSLQSGIFIALGVLAAALAWFWWRKRRHYQLYRAQLSEKRAKRKAEKAAKKAAQKQQ

SEQ ID NO: 365 - protein, 147 aa, Neisseria
MKKLLAAVMMAGLAGAVSAAGVHVEDGWARTTVEGMKIGGAFMKIHNDEAKQDFLLGGSSPVADRVEVHTHINDNGVMRMREVEGGVPLEAKSVTELKPGSYHVMFMGLKKQLKEGDKIPVTLKFKNAKAQTVQLEVKIAPMPAMNH

SEQ ID NO: 366 - protein, 157 aa, Neisseria
MKKLLAAVMMAGLAGAVSAAGVHVEDGWARTTVEGMKIGGAFMKIHNDEAKQDFLLGGSSPVADRVEVHTHINDNGVMRMREVEGGVPLEAKSVTELKPGSYHVMFMGLKKQLKEGDKIPVTLKFKNAKAQTVQLEVKIAPMPAMNHGHHHGEAHQH

SEQ ID NO: 367 - protein, 157 aa, Neisseria
  VARIANT (1)...(157): Xaa = Any Amino Acid
MKXLLAAVMMAGLAGAVSAAGIHVEDGWARTTVEGMKMGGAFMKIHNDEAKQDFLLGGSSPVADRVEVHTHINDNGVMRMREVEGGVPLEAKSVTELKPGSYHVMFMGXKKQLKXGDKIPVTLKFKNAKAQTVQLEVKTAPMSAMDHGHHHGEAHQH

SEQ ID NO: 368 - protein, 86 aa, Neisseria
INDNGVMRMREVKGGVPLEAKSVTELKPGSYHVMFMGLKKQLKEGDKIPVTLKFKNAKAQTVQLEVKTAPMSAMNHGHHHGEAHQH

SEQ ID NO: 369 - protein, 157 aa, Neisseria
MKKLLAAVMMAGLAGAVSAAGVHVEDGWARTTVEGMKMGGAFMKIHNDEAIQDFVLGGSMPVADRVEVHTHINDNGVMRMREVKGGVPLEAKSVTELKPGSYHVMFMGLKKQLKEGDKIPVTLKFKNAKAQTVQLEVKTAPMSAMNHGHHHGEAHQH

SEQ ID NO: 370 - protein, 233 aa, Neisseria
  VARIANT (1)...(233): Xaa = Any Amino Acid
MTVTAAEGGKAAKALKKYLITGILVWLPIAVTVWVVSYIVSASDQLVNLLPKQWRPQYVLGFNIPGLGVIVAIAVLFVTGLFAANVLGRQILAAWDSLLGRIPVVKSIYSSVKKVSEYVLSDSSRSFKTPVLVPFPQPGIWTIAFVSGQVSNAVKAALPXDGDYLSVYVPTTPNPTGGYYIMVKKSDVRELDMSVDEXLKYVISLGMVIPDDLPVKTLAXPMPSEKADLPEQQ

SEQ ID NO: 371 - protein, 233 aa, Neisseria
  VARIANT (1)...(233): Xaa = Any Amino Acid
MTEXAAEGGKAAKALKKYLITGILVWLPIAVTVWVVSYIVSASDQLVNLLPKQWRPQYVLGFNIPGLGVIVAIAVLFVTGLFAANVLGRQILAAWDSLLGRIPVVKSIYSSVKKVSESLLSDSSRSFKTPVLVPFPQPGIWTIAFVSGQVSNAVKAALPKDGDYLSVYVPTTPNPTGGYYIMVKKSDVRELDMSVDEALKYVISLGMVIPDDLPVKTLAGPMPSEKADLPEQQ

SEQ ID NO: 372 - protein, 233 aa, Neisseria
  VARIANT (1)...(233): Xaa = Any Amino Acid
MTEPAAEGGKAAKALKKYLITGILVWLPIAVTVWVVSYIVSASDQLVNLLPKQWRPQYVLGFNIPGLGVIVAIAVLFVTGLFAANVLGRQILAAWDSLLGRIPVVKSIYSSVKKVSXSLLSDSSRSFKTPVLVPFPQSGIWTIAFVSGQVSNAVKAALPKDGDYLSVYVPTTPNPTGGYYIMVKKSDVRELDMSVDEALKYVISLGMVIPDDLPVKTLAGPMPSEKADLPEQQ

SEQ ID NO: 373 - protein, 233 aa, Neisseria
  VARIANT (1)...(233): Xaa = Any Amino Acid
MTEPAAEGGKAAKALKKYLITGILVWLPIAVTVWVVSYIVSASDQLVNLLPKQWRPQYVLGFNIPGLGVIVAIAVLFVTGLFAANVLGRQILAAWDSLLXRIPVVKSIYSSVKKVSESLLSDSSRSFKTPVLVPFPQSGIWTIAFVSGQVSNAVKAALPQDGDYLSVYVPTTPNPTGGYYIMVKKSDVRELDMSVDEALKYVISLGMVIPDDLPVKTLAGPMPPEKAELPEQQ

SEQ ID NO: 374 - protein, 233 aa, Neisseria
MTEPAAEGGKAAKALKKYLITGILVWLPIAVTVWVVSYIVSASDQLVNLLPKQWRPQYVLGFNIPGLGVIVAIAVLFVTGLFAANVLGRQILAAWDSLLGRIPVVKSIYSSVKKVSESLLSDSSRSFKTPVLVPFPQSGIWTIAFVSGQVSNAVKAALPQDGDYLSVYVPTTPNPTGGYYIMVKKSDVRELDMSVDEALKYVISLGMVIPDDLPVKTLAGPMPPEKAELPEQQ

SEQ ID NO: 375 - protein, 386 aa, Neisseria
  VARIANT (1)...(386): Xaa = Any Amino Acid
MKTVVWIVVLFAAAVGLALASGIYTGDVYIVLGQTMLRINLHAFVLGSLIAVVVWYFLFKFIIGVLNIPEKMQRFGSARKGXKXXLALNKAGLAYFEGRFEKAELEASRVLVNKVGRDNRTLALMLXAHAAGQMENIXXRDRYLAEIAKLPEKQQLSRYLLLAESALNRRDYEAAEANLHAAAKMNANLTRLVRLXIRYAFDRGDALQVLAKTEKLSKAGALGKSEMERYQNWAYRRQLADAADAAALKTCLKRIPDSLKNGELSVSVAEKYERLGLYADAVKWVKQHYPXNRRPELLEAFVESVRFLGEREQQKAIDFADAWLKEQPDNALLLMYLGRLAFGRKLWGKAKGYLEASIALKPSISARLVLTKVFDEIGEPQKAEAH

SEQ ID NO: 376 - protein, 407 aa, Neisseria
MKTVVWIVVLFAAAVGLALASGIYTGDVYIVLGQTMLRINLHAFVLGSLIAVVVWYFLFKFIIGVLNIPEKMQRFGSARKGRKAALALNKAGLAYFEGRFEKAELEASRVLVNKEAGDNRTLALMLGAHAAGQMENIELRDRYLAEIAKLPEKQQLSRYLLLAESALNRRDYEAAEANLHAAAKMNANLTRLVRLQLRYAFDRGDALQVLAKTEKLSKAGALGKSEMERYQNWAYRRQLADAADAAALKTCLKRIPDSLKNGELSVSVAEKYERLGLYADAVKWVKQHYPHNRRPELLEAFVESVRFLGEREQQKAIDFADAWLKEQPDNALLLMYLGRLAYGRKLWGKAKGYLEASIALKPSISARLVLAKVFDEIGEPQKAEAQRNLVLEAVSDDERHAALEQHS

SEQ ID NO: 377 - protein, 405 aa, Neisseria
  VARIANT (1)...(405): Xaa = Any Amino Acid
MKTVVWIVVLFAAAXGLALASGIXTGDVYIVLGQTMLRINLHAFVLGSLIAVVVWYFLFKFIIGVLNXPEKMQRFGSARKGRKAALALNKAGLAYFEGRFEKAELEASRVLGNKEAGDNRTLALMLGAHAAGQMENIELRDRYLAEIAKLPEKQQLSRYLLLAESALNRRDYEAAEANLHAAAKMNANLTRLVRLQLRYAFDRGDALQVLAKTEKXSKAGAXGKSEMERYQNWAYRRQLXDAADAAALKTCLKRIPDSLKNGELSVSVAEKYERLGLYADAVKWVKQHYPHNRRPELLEAFVESVRFLGERDQQKAIDFADAWLKEQPDNALLLXYLGRLAYGRKLWGKAKGYLEASIALKPSISARLVLAKVFDETGEPQKAEAQRNLVLASVAEENRPSAETH

SEQ ID NO: 378 - protein, 405 aa, Neisseria
MKTVVWIVVLFAAAVGLALASGIYTGDVYIVLGQTMLRINLHAFVLGSLIAVVVWYFLFKFIIGVLNIPENMRRSGSARKGRKAALALNKAGLAYFEGRFEKAELEASRVLGNKEAGDNRTLALMLGAHAAGQMENIELRDRYLAEIAKLPEKQQLSRYLLLAESALNRRDYEAAEANLHAAAKMNANLTRLVRLQLRYAFDRGDALQVLAKTEKLSKAGALGKSEMERYQNWAYRRQMADAADAAALKTCLKRIPDSLKNGELSVSVAEKYERLGLYADAVKWVKQHYPHNRRPELLEAFVESVRFLGEREQQKAIDFADSWLKEQPDNALLLMYLGRLAYGRKLWGKAKGYLEASIALKPSIPARLVLAKVFDETAQSQKAEAQRNLVLASVAGENRPSAETR

SEQ ID NO: 379 - protein, 142 aa, Neisseria
  VARIANT (1)...(142): Xaa = Any Amino Acid
MMFSWFKLFHLFFVISWFAGLFYLPRIFVNMAMIDVPRGNPEYVRLSGMAVRLYRFMSPLGFGAVVFGAAIPFAAGWWGSGWVHVKLCLGLMLLAYQLYCGVLLRRFQDYSNAFSHRWYRVFNEIPVLLMVAALYXVVFKPF

SEQ ID NO: 380 - protein, 142 aa, Neisseria
MMFSWFKLFHLFFVISWFAGLFYLPRIFVNMAMIDVPRGNPEYVRLSGMAVRLYRFMSPLGFGAVVFGAAIPFAAGWWGSGWVHVKLCLGLMLLAYQLYCGVLLRRFQDYSNAFSHRWYRVFNEIPVLLMVAALYLVVFKPF

SEQ ID NO: 381 - protein, 142 aa, Neisseria; identical to SEQ ID NO: 380

SEQ ID NO: 382 - protein, 142 aa, Neisseria
MMFSWFKLFHLFFVISWFAGLFYLPRIFVNMAMIDAPRGNPEYVRLSGMAVRLYRFMSPLGFGAVVFGAAIPFAAGRWGSGWVHVKLCLGLMLLAYQLYCGVLLRRFQDYSNAFSHRWYRVFNEIPVLLMVAALYLVVFKPF

SEQ ID NO: 383 - protein, 392 aa, Neisseria
  VARIANT (1)...(392): Xaa = Any Amino Acid
MAKMMKWAAVAAVAAAAVWGGWSXLKPEPHVLDITETVRRGXXXXXXXXXXXXXXXXXXXXXXXXXXXXXXXXXXXXXXXXXXXXXXXXXXXXXXXXXXXXXXXXXXXXXXXXXXXXXXXXXXXXXXXXXXXXXXXXXXXXXXXXXXXXXXXXXXXXXXXXXXXXXXXXXXXXXXXXXXXXXXXXXXXXXXXXXXXXXXXXXXXXXXXXXXXXXXXXXXXXXXXXXXXXXXXXXXXXXXISFTILSEPDTPIKAKLDSVDPGLTTMSSGGYNSSTDTASNAVYYYARSFVPNPDGKLATGMTTQNTVEIDGVKNVLIIPSLTVKNRGGKAFVRVLGADGKAAEREIRTGMRDSMNTEVKSGLKEGDKVVISEITAAEQQESGERALGGPPRR

SEQ ID NO: 384 - protein, 334 aa, Neisseria
VSVGAQASGQIKILYVKLGQQVKKGDLIAEINSTSQTNTLNTEKSKLETYQAKLVSAQIALGSAEKKYKRQAALWKENATSKEDLESAQDAFAAAKANVAELKALIRQSKISINTAESELGYTRITATMDGTVVAILVEEGQTVNAAQSTPTIVQLANLDMMLNKMQIAEGDITKVKAGQDISFTILSEPDTPIKAKLDSVDPGLTTMSSGGYNSSTDTASNAVYYYARSFVPNPDGKLATGMTTQNTVEIDGVKNVLIIPSLTVKNRGGKAFVRVLGADGKAAEREIRTGMRDSMNTEVKSGLKEGDKVVISEITAAEQQESGERALGGPPRR

SEQ ID NO: 385 - protein, 392 aa, Neisseria
MAKMMKWAAVAAVAAAAVWGGWSYLKPEPQAAYITETVRRGDISRTVSATGEISPSNLVSVGAQASGQIKKLYVKLGQQVKKGDLIAEINSTSQTNTLNTEKSKLETYQAKLVSAQIALGSAEKKYKRQAALWKDDATAKEDLESAQDALAAAKANVAELKALIRQSKISINTAESELGYTRITATMDGTVVAILVEEGQTVNAAQSTPTIVQLANLDMMLNKMQIAEGDITKVKAGQDISFTILSEPDTPIKAKLDSVDPGLTTMSSGGYNSSTDTASNAVYYYARSFVPNPDGKLATGMTTQNTVEIDGVKNVLIIPSLTVKNRGGRAFVRVLGADGKAAEREIRTGMRDSMNTEVKSGLKEGDKVVISEITAAEQQESGERALGGPPRR

SEQ ID NO: 386 - protein, 392 aa, Neisseria
MAKMMKWAAVAAVAAAAVWGGWSYLKPEPQAAYITEAVRRGDISRTVSATGEISPSNLVSVGAQASGQIKKLYVKLGQQVKKGDLIAEINSTTQTNTIDMEKSKLETYQAKLVSAQIALGSAEKKYKRQAALWKDDATSKEDLESAQDALAAAKANVAELKALIRQSKISINTAESDLGYTRITATMDGTVVAIPVEEGQTVNAAQSTPTIVQLANLDMMLNKMQIAEGDITKVKAGQDISFTILSEPDTPIKAKLDSVDPGLTTMSSGGYNSSTDTASNAVYYYARSFVPNPDGKLATGMTTQNTVEIDGVKNVLLIPSLTVKNRGGKAFVRVLGADGKAVEREIRTGMKDSMNTEVKSGLKEGDKVVISEITAAEQQESGERALGGPPRR

SEQ ID NO: 387 - protein, 184 aa, Neisseria
IPATMTFERSGNAYKIVSTIKVPLYNIRFESGGTVVGNTLHPTYYRDIRRGKLYAEAKFADGSVTYGKAGESKTEQSPKAMDLFTLAWQLAANDAKLPPGLKITNGKKLYSVGGLNKAGTGKYSIGGVETEVVKYRVRRGDDAVMYFFAPSLNNIPAQIGYTDDGKTYTLKLKSVQINGQAAKP

SEQ ID NO: 388 - protein, 223 aa, Neisseria
MMKTFKNIFSAAILSAALPCAYAAGLPQSAVLHYSGSYGIPATMTFERSGNAYKIVSTIKVPLYNIRFESGGTVVGNTLHPTYYRDIRRGKLYAEAKFADGSVTYGKAGESKTEQSPKAMDLFTLAWQLAANDAKLPPGLKITNGKKLYSVGGLNKAGTGKYSIGGVETEVVKYRVRRGDDAVMYFFAPSLNNIPAQIGYTDDGKTYTLKLKSVQINGQAAKP

SEQ ID NO: 389 - protein, 223 aa, Neisseria
  VARIANT (1)...(223): Xaa = Any Amino Acid
MMKTFKNIFSAAILSAALPCAYAAGLPXSAVLHYSGSYGIPATXXXXXXXNAXKIVSTIKVPLYNIRFESGGTVVGNTLHPTYYRDIRRGKLYAEAKFADGSVTYGKAXXXXXXQSPKAMDLFTLAWQLAANDAKLPPGLKITNGKKLYSVGGLNKAGTGKYSIGGVETEVVKYRVRRGDDAVMYFFAPSLNNIPAQIGYTDDGKTYTLKLKSVQINGQAAKP

SEQ ID NO: 390 - protein, 223 aa, Neisseria
MMKTFKNIFSAAILSAALPCAYAARLPQSAVLHYSGSYGIPATMTFERSGNAYKIVSTIKVPLYNIRFESGGTVVGNTLHPAYYKDIRRGKLYAEAKFADGSVTYGKAGESKTEQSPKAMDLFTLAWQLAANDAKLPPGLKITNGKKLYSVGGLNKAGTGKYSIGGVETEVVKYRVRRGDDTVTYFFAPSLNNIPAQIGYTDDGKTYTLKLKSVQINGQAAKP

SEQ ID NO: 391 - protein, 156 aa, Neisseria
  VARIANT (1)...(156): Xaa = Any Amino Acid
MYRRKGRGIKPWMGAGXAFAALVWLVFALGDTLTPFAVAAVLAYVLDPLVEWLQKKGLNRASASMSVMVFSLILLLALLLIIVPMLVGQFNNLASRLPQLIGFMQNTLLPWLKNTIGGYVEIDQASIIAWLQAHTGELSNALKAWFPVLMRQGGNI

SEQ ID NO: 392 - protein, 356 aa, Neisseria
MYRRKGRGIKPWMGAGAAFAALVWLVFALGDTLTPFAVAAVLAYVLDPLVEWLQKKGLNRASASMSVMVFSLILLLALLLIIVPMLVGQFNNLASRLPQLIGFMQNTLLPWLKNTIGGYVEIDQASIIAWLQAHTGELSNALKAWFPVLMRQGGNIVSSIGNLLLLPLLLYYFLLDWQRWSCGIAKLVPRRFAGAYTRITGNLNEVLGEFLRGQLLVMLIMGLVYGLGLVLVGLDSGFAIGMLAGILVFVPYLGAFTGLLLATVAALLQFGSWNGILSVWAVFAVGQFLESFFITPKIVGDRIGLSPFWVIFSLMAFGQLMGFVGMLAGLPLAAVTLVLLREGVQKYFAGSFYRGR

SEQ ID NO: 393 - protein, 356 aa, Neisseria
MYRRKGRGIKPWMDAGAAFAALVWLVFALGDTLTPFAVAAVLAYVLDPLVEWLQKKGLNRASASMSVMVFSLILLLALLLIIVPMLVGQFNNLASRLPQLIGFMQNTLLPWLKNTIGGYVEIDQASIIAWLQAHTGELSNALKAWFPVLMRQGGNIVSSIGNLLLLPLLLYYFLLDWQRWSCGIAKLVPRRFAGAYTRITGNLNEVLGEFLRGQLLVMLIMGLVYGLGLVLVGLDSGFAIGMVAGILVFVPYLGAFTGLLLATVAALLQFGSWNGILAVWAVFAVGQFLESFFITPKIVGDRIGLSPFWVIFSLMAFGQLMGFVGMLAGLPLAAVTLVLLREGVQKYFAGSFYRGR

SEQ ID NO: 394 - protein, 253 aa, Neisseria
MYRRKGRGIKPWMGAGAAFAALVWLVYALGDTLTPFAVAAVLAYVLDPLVEWLQKKGLNRASASMSVMVFSLILLLALLLIIVPMLVGQFNNLASRLPQLIGFMQNTLLPWLKNTIGGYVEIDQASIIAWFQAHTGELSNALKAWFPVLMKQGGNIVSTIGNLLLPPLLLYYFLLDWHRWSCGIPKLVPRRFAGAYTRITGNLNKVWGKFLRGQLLGETERGAVVCRVGRECWEGGGARSRPSDDGWPRWGGG

SEQ ID NO: 395 - protein, 356 aa, Neisseria
MYRRKGRGIKPWMGAGAAFAALVWLVYALGDTLTPFAVAAVLAYVLDPLVEWLQKKGLNRASASMSVMVFSLILLLALLLIIVPMLVGQFNNLASRLPQLIGFMQNTLLPWLKNTIGGYVEIDQASIIAWFQAHTGELSNALKAWFPVLMKQGGNIVSSIGNLLLPPLLLYYFLLDWQRWSCGIAKLVPRRFAGAYTRITGNLNEVLGEFLRGQLLVMLIMGLVYGLGLMLVGLDSGFAIGMVAGILVFVPYLGAFTGLLLATVAALLQFGSWNGILAVWAVFAVGQFLESFFITPKIVGDRIGLSPFWVIFSLMAFGELMGFVGMLAGLPLAAVTLVLLREGAQKYFAGSFYRGR

SEQ ID NO: 396 - protein, 182 aa, Neisseria
  VARIANT (1)...(182): Xaa = Any Amino Acid
TAFSAALRLSPSXLVIFLSFGKPYQQTAAILTFFCTSCPPRSNAYQQYRRLRLYAFHPPEIAEFFVGFAFDVDARNVYAQIGGDVGTHLRNVRRECGFLCNHGRIDIDRLPTLRLNALIRRTQKDAAVRIFELCGGVGEMAADIAQTCRTEQRVGNGVQQRIGIGVSEQPFFKWDFNSAKYQ

SEQ ID NO: 397 - protein, 256 aa, Neisseria
ISYWASSSPDFLEVDTAPLIFLPLLPKASMKKLMVEPVPMPIYSFSGTNSTAFSAAMRLSSSCVVIFLSFGKPYQQTAAILTFFCTSCPPRSNAYQQYRRLRLYAFHPPEIAEFFVGFAFDVDARNVYAQIGGDVGTHLRNVRREFGFLCNHGRIDIDRLPTLRLNALIRRTQKDAAVRIFELCGGVGEMAADIAQTCRTEQRVGNGVQQRIGIGVSEQPFFKWDFNSAKYQLSAFGQLVDIVALSDTDVRHRLCS

SEQ ID NO: 398 - protein, 256 aa, Neisseria
  VARIANT (1)...(256): Xaa = Any Amino Acid
ISYWASSSLDFLEVDTAPLIFLPLLPKASMKKLMVEPVPMPMYSFSGTNSTAFSAAMRLSSSCVVIFLSFGKPYQQTAAILTFFXTSCPPRSNPYQQYRRLRLYAFHAPEITEFFVGFAFXVDARNVYAQIGGDVGTHLRNMRREFGFLCNHGRIDIDRLPTLRLNALIRRTQKDAAVRIFELCGGVGEMAADIAQTCRTEQRVGNGVQQRIGIGVSEQPFFKWDFNSAKYQLSAFGQLVDIVALSDTDVRHRLCS

SEQ ID NO: 399 - protein, 256 aa, Neisseria
MSYRASSSPDFLEVETAPLIFLPLLPKASMKKLMVEPVPMPMYSFSGTNSTAFSAAMRLSSSCVVIFLSFGKPYQQTAAILTFFCTSWPPRSNPYQQYRRLRLYAFHPPEIAEFFVGFAFDIDARNIDTQIGGDVGTHLRNVRCEFGFLCNHGRIDIDHLPTLRLNALIRRTQKDAAVRIFELCGGVGKMAADVAQTCRTEQRVGNGVQQRVGIRMPEQPFFKWDFNSAKYQLSAFGQLVDIVALSDTDIRHRLCS

SEQ ID NO: 400 - protein, 64 aa, Neisseria
AGASANNISARFAETPVAVSVTLIGTVLAVMLPVTEYENFLLLIGSVFAPMGGFDCRLFRLETA

SEQ ID NO: 401 - protein, 407 aa, Neisseria
MSGNASSPSSSSAIGLIWFGAAVSIAEISTGTLLAPLGWQRGLAALLLGHAVGGALFFAAAYIGALTGRSSMESVRLSFGKRGSVLFSVANMLQLAGWTAVMIYAGATVSSALGKVLWDGESFVWWALANGALIVLWLVFGARKTGGLKTVSMLLMLLAVLWLSAEVFSTAGSTAAQVSDGMSFGTAVELSAVMPLSWLPLAADYTRHARRPFAATLTATLAYTLTGCWMYALGLAAALFTGETDVAKILLGAGLGAAGILAVVLSTVTTTFLDAYSAGASANNISARFAETPVAVGVTLIGTVLAVMLPVTEYENFLLLIGSVFAPMAAVLIADFFVLKRREEIEGFDFAGLVLWLAGFILYRFLLSSGWESSIGLTAPVMSAVAIATVSVRLFFKKTQSLQRNPS

SEQ ID NO: 402 - protein, 347 aa, Neisseria
  VARIANT (1)...(347): Xaa = Any Amino Acid
MSGNASSXSSSAAIGLIWFGAAVSIAEISTGTLLAPLGWQRGLAALLLGHAVGGALFFAAAYIGALTGXXSMESVRLSFGKRGSVLFSVANMLQLAGWTAVMIYAGATVSSALGKVLWDGESFVWWALANGALIVLWLVFGARKTGGLKTVSMLLMLLAVLWLSAEXFSTAGSTAAXVXDGMSFGTAVELSAVMPLSWLPLAADYTRHARRPFAATLTATLAYTLTGCWMYALGLAAALFTGETDVAKILLGAGLGAAGILAVVLSTVTTTFLDAYSAGVSANNISAKLSEIPIAVAVAVVGTLLAVLLPVTEYENFLLLIGSVFAPMAAVLIADFFVLKRREEIEG

SEQ ID NO: 403 - protein, 343 aa, Neisseria
MSGNASSPSSSAAIGLVWFGAAVSIAEISTGTLLAPLGWQRGLAALLLGHAVGGALFFAAAYIGALTGRSSMESVRLSFGKCGSVLFSVANMLQLAGWTAVMIYVGATVSSALGKVLWDGESFVWWALANGALIVLWLVFGARRTGGLKTVSMLLMLLAVLWLSVEVFASSGTNAAPAVSDGMTFGTAVELSAVMPLSWLPLAADYTRQARRPFAATLTATLAYTLTGCWMYALGLAAALFTGETDVAKILLGAGLGITGILAVVLSTVTTTFLDTYSAGASANNISARFAEIPVAVGVTLIRTVLAVMLPVTEYKNFLLLIRSVFGPMAGGFDCRLFCLKTA

SEQ ID NO: 404 - protein, 408 aa, Neisseria
MSGNASSPSSSAAIGLVWFGAAVSIAEISTGTLLAPLGWQRGLAALLLGHAVGGALFFAAAYIGALTGRSSMESVRLSFGKCGSVLFSVANMLQLAGWTAVMIYVGATVSSALGKVLWDGESFVWWALANGALIVLWLVFGARRTGGLKTVSMLLMLLAVLWLSVEVFASSGTNAAPAVSDGMTFGTAVELSAVMPLSWLPLAADYTRQARRPFAATLTATLAYTLTGCWMYALGLAAALFTGETDVAKILLGAGLGITGILAVVLSTVTTTFLDTYSAGASANNISARFAEIPVAVGVTLIGTVLAVMLPVTEYKNFLLLIGSVFAPMAAVLIADFFVLKRREEIEGFDFAGLVLWLAGFILYRFLLSSGWESSIGLTAPVMSAVAIATVSVRLFFKKTQSLQRNPS

SEQ ID NO: 405 - protein, 183 aa, Neisseria
  VARIANT (1)...(183): Xaa = Any Amino Acid
MTRIAILGGGLSGRLTALQLAEQGYQIALFDKSCRRGEHAAAYVAAAMLAPAAXTVEATPEVVRLGRQSIPLWRGIRCRLNTHTMMQENGSLIVWHGQDKPLSSEFVRHLKRGGXTDDEIVRWRADDIAEREPQLGGRFXDGIYLPTEXQLDGRQLXSALADALDELNVPCHWEHECVPEACK

SEQ ID NO: 406 - protein, 366 aa, Neisseria
MTRIAILGGGLSGRLTALQLAEQGYQIALFDKGCRRGEHAAAYVAAAMLAPAAEAVEATPEVVRLGRQSIPLWRGIRCRLNTHTMMQENGSLIVWHGQDKPLSSEFVRHLKRGGVADDEIVRWRADDIAEREPQLGGRFSDGIYLPTEGQLDGRQILSALADALDELNVPCHWEHECVPEGLQAQYDWLIDCRGYGAKTAWNQSPEHTSTLRGIRGEVARVYTPEITLNRPVRLLHPRYPLYIAPKENHVFVIGATQIESESQAPASVRSGLELLSALYAIHPAFGEADILEIATGLRPTLNHHNPEIRYNRARRLIEINGLFRHGFMISPAVTAAAARLAVALFDGKDAPERDKESGLAYIRRQD

SEQ ID NO: 407 - protein, 366 aa, Neisseria
  VARIANT (1)...(366): Xaa = Any Amino Acid
MTRIAILGGGLSGRLTALQLAEQGYQIALFDKGCRRGEHAAAYVAAAMLAPAAEAVEATPEVVRLGRQXIPLWRGIRCHLKTPAMMXENGSLIVWHGQDKPLSNEFVRHLKRGGVADDXIVRWRADDIAEREPQLGGRFSDGIYLPTEGQLDGRQILSALADALDELNVPCHWEHECAPEDLQAQYDWLIDCRGYGAKTAWNQSPXXTSTLRGIRGEVARVYTPEITLNRPVRLLHPRYPLYIAPKENXVFVIGATQIESESQAPASVRSGLELLSALYAVHPAFGEADILEIATGLRPTLNHHNPEIRYNRARRLIEINGLFRHGFMISPAVTAAAVRLAVALFDGKXAPERDEESGLAYIRRQD

SEQ ID NO: 408 - protein, 366 aa, Neisseria
MTRIAVLGGGLSGRLTALQLAEQGYQIELFDKGTRQGEHAAAYVAAAMLAPAAEAVEATPEVIRLGRQSIPLWRGIRCRLNTLTMMQENGSLIVWHGQDKPLSSEFVRHLKRGGVADDEIVRWRADEIAEREPQLGGRFSDGIYLPTEGQLDGRQILSALADALDELNVPCHWEHECAPQDLQAQYDWVIDCRGYGAKTAWNQSPEHTSTLRGIRGEVRGFTRPKSRSTAPCACCTRAIRSTSPRKKTTSSSSARPKSKAKAKPPPAYVPGWNSYPRSMPSTPPSAKPTSSKWRPGLRPTLNHHNPEIRYSRERRLIEINGLFRHGFMISPAVTAAAVRLAVALFDGKDAPERDEESGLAYIGRQD

SEQ ID NO: 409 - protein, 366 aa, Neisseria
MTRIAVLGGGLSGRLTALQLAEQGYQIELFDKGTRQGEHAAAYVAAAMLAPAAEAVEATPEVIRLGRQSIPLWRGIRCRLNTLTMMQENGSLIVWHGQDKPLSSEFVRHLKRGGVADDEIVRWRADEIAEREPQLGGRFSDGIYLPTEGQLDGRQILSALADALDELNVPCHWEHECAPQDLQAQYDWVIDCRGYGAKTAWNQSPEHTSTLRGIRGEVARVYTPEITLNRPVRLLHPRYPLYIAPKENHVFVIGATQIESESQAPASVRSGLELLSALYAVHPAFGEADILEIAAGLRPTLNHHNPEIRYSRERRLIEINGLFRHGFMISPAVTAAAVRLAVALFDGKDAPERDEESGLAYIGRQD

SEQ ID NO: 410 - protein, 150 aa, Neisseria
  VARIANT (1)...(150): Xaa = Any Amino Acid
MTDNRGFTLVELISVVLILSVLALIVYPSYRNYVEKAKINAVRAALLENAHFMEKFYLQNGRFKQTSTKWPSLPIKEAEGFCIRLNGIVARXALDSKFMLKAVAIDKDKNPFIIKMNENLVTFICKKSASSCSDGLDYFKGNDKDCKLLK

SEQ ID NO: 411 - protein, 149 aa, Neisseria
MTDNRGFTLVELISVVLILSVLALIVYPSYRNYVEKAKINAVRAALLENAHFMEKFYLQNGRFKQTSTKWPSLPIKEAEGFCIRLNGIARGALDSKFMLKAVAIDKDKNPFIIKMNENLVTFICKKSASSCSDGLDYFKGNDKDCKLLK

SEQ ID NO: 412 - protein, 149 aa, Neisseria
MTDNRGFTLVELISVVLILSVLALIVYPSYRNYVEKAKINTVRAALLENAHFMEKFYLQNGRFKQTSTKWPSLPIKEAEGFCIRLNGIARGALDSKFMLKAVAIDKDKNPFIIKMNENLVTFICKKSASSCSDGLDYFKGNDKDCKLLK

SEQ ID NO: 413 - protein, 149 aa, Neisseria
MTDNRGFTLVELISVVLILSVLALIVYPSYRNYVEKAKINAVRAAFLENAHFMEKFYLQNGRFKQTSTKWPSLPIKEAEGFCIRLNGIARGALDSKFMLKAVAIDKDKNPFIIKMNENLVTFICKKSASSCSDRLDYFKGNDKDCKLLK

SEQ ID NO: 414 - protein, 244 aa, Neisseria
VSLASVIASQIFLYEDFNQMRKTVELSAVFLSNIYLGFQQGYFDLSADENPVLHIWSLAVEEQYYLLYPLLLIFCCKKTKSLRVLRNISIILFLILTASSFLPSGFYTDILNQPNTYYLSTLRFPELLAGSLLAVYGQTQNGRRQTANGKRQLLSSLCFGALLACLFVIDKHNPFIPGMTLLLPCLLTALLIRSMQYGTLPTRILSASPIVFVGKISYSLYLYHWIFIAFAPLIRGGKQLGLPA

SEQ ID NO: 415 - protein, 622 aa, Neisseria
MQAVRYRPEIDGLRAVAVLSVMIFHLNNRWLPGGFLGVDIFFVISGFLITGIILSEIQNGSFSFRDFYTRRIKRIYPAFIAAVSLASVIASQIFLYEDFNQMRKTVELSAVFLSNIYLGFQQGYFDLSADENPVLHIWSLAVEEQYYLLYPLLLIFCCKKTKSLRVLRNISIILFLILTASSFLPSGFYTDILNQPNTYYLSTLRFPELLAGSLLAVYGQTQNGRRQTANGKRQLLSSLCFGALLACLFVIDKHNPFIPGMTLLLPCLLTALLIRSMQYGTLPTRILSASPIVFVGKISYSLYLYHWIFIAFAHYITGDKQLGLPAVSAVAALTAGFSLLSYYLIEQPLRKRKMTFKKAFFCLYLAPSLILVGYNLYARGILKQEHLRPLPGAPLAAENHFPETVLTLGDSHAGHLRGFLDYVGSREGWKAKILSLDSECLVWVDEKLADNPLCRKYRDEVEKAEAVFIAQFYDLRMGGQPVPRFEAQSFLIPGFPARFRETVKRIAAVKPVYVFANNTSISRSPLREEKLKRFAANQYLRPIQAMGDIGKSNQAVFDLIKDIPNVHWVDAQKYLPKNTVEIYGRYLYGDQDHLTYFGSYYMGREFHKHERLLKSSHGGALQ

SEQ ID NO: 416 - protein, 622 aa, Neisseria
MQAVRYRPEIDGLRAVAVLSVMIFHLNNRWLPGGFLGVDIFFVISGFLITGIILSEIQNGSFSFRDFYTRRIKRIYPAFIAAVSLASVIASQIFLYEDFNQMRKTVELSAVFLSNIYLGFQQGYFDLSADENPVLHIWSLAVEEQYYLLYPLLLIFCCKKTKSLRVLRNISIILFLILTATSFLPSGFYTDILNQPNTYYLSTLRFPELLAGSLLAVYGQTQNGRRQTANGKRQLLSSLCFGALLACLFVIDKHNPFIPGMTLLLPCLLTALLIRSMQYGTLPTRILSASPIVFVGKISYSLYLYHWIFIAFAHYITGDKQLGLPAVSAVAALTAGFSLLSYYLIEQPLRKRKMTFKKAFFCLYLAPSLILVGYNLYARGILKQEHLRPLPGAPLAAENHFPETVLTLGDSHAGHLRGFLDYVGSREGWKAKILSLDSECLVWVDEKLADNPLCRKYRDEVEKAEAVFIAQFYDLRMGGQPVPRFEAQSFLIPGFPARFRETVKRIAAVKPVYVFANNTSISRSPLREEKLKRFAANQYLRPIQAMGDIGKSNQAVFDLIKDIPNVHWVDAQKYLPKNTVEIYGRYLYGDQDHLTYFGSYYMGREFHKHERLLKSSRDGALQ

SEQ ID NO: 417 - protein, 622 aa, Neisseria
MQAVRYRPEIDGLRAVAVLSVIIFHLNNRWLPGGFLGVDIFFVISGFLITNIILSEIQNGSFSFRDFYTRRIKRIYPAFIAAVSLASVIASQIFLYEDFNQMRKTIELSTVFLSNIYLGFRLGYFDLSADENPVLHIWSLAVEEQYYLLYPLLLIFCYKKTKSLRVLRNISIILFLILTASSFLPAGFYTDILNQPNTYYLSTLRFPELLVGSLLAVYGQTQNGRRQTENGKRQLLSLLCFGALLVCLFVIDKHDPFIPGITLLLPCLLTALLIRSMQYGTLPTRILSASPIVFVGKISYSLYLYHWIFIAFAHYITGDKQLGLPAVSAVAALTAGFSLLSYYLIEQPLRKRKMTFKKAFFCLYLAPSLMLVGYNLYSRGILKQEHLRPLPGTPVAAENNFPETVLTLGDSHAGHLRGFLDYVGGREGWKAKILSLDSECLVWVDEKLADNPLCRKYRDEVEKAEAVFIAQFYDLRMGGQPVPRFEAQSFLIPGFKARFRETVKRIAAVKPVYVFANNTSISRSPLREEKLKRFAINQYLRPIRAMGDIGKSNQAVFDLVKDIPNVHWVDAQKYLPKNTVEIHGRYLYGDQDHLTYFGSYYMGREFHKHERLLKHSRGGALQ

SEQ ID NO: 418 - protein, 88 aa, Neisseria
  VARIANT (1)...(88): Xaa = Any Amino Acid
IIYEYRWMFLYGALTTLGLTVVAXAGGSVLGLLLALARLIHLEKAGAPMRVLAWALRKVSLLYVTLFRGTPLFVQIVIWAYVWFPFFV

SEQ ID NO: 419 - protein, 248 aa, Neisseria
MDFRFDIIYEYRWMFLYGALTTLGLTVVATAGGSVLGLLLALARLIHLEKAGAPMRVLAWALRKVSLLYVTLFRGTPLFVQIVIWAYVWFPFFVHPSDGILVSGEAAIALRRGYGPLIAGSLALIANSGAYICEIFRAGIQSIDKGQMEAARSLGLTYPQAMRYVILPQALRRMLPPLASEFITLLKDSSLLSVIAVAELAYVQNTITGRYSVYEEPLYTVALIYLLMTTFLGWIFLRLEKRYNPQHR

SEQ ID NO: 420 - protein, 248 aa, Neisseria; identical to SEQ ID NO: 419

SEQ ID NO: 421 - protein, 174 aa, Neisseria
MDFRFDIIYEYRWMFLYGALTTLGLTVVATAGGSVLGLLLALARLIHLEKAGAPMRVLAWALRKVSLLYVTLFRGTPLFVQIVIWAYVWFPFFVILHTAFLGNAMRQSRRVPDKGRWIAGSLELNCQPRGRKTRGEFPPGESNLGTEPRNPLSMGQRRFPGCENWYPPQNFIKK

SEQ ID NO: 422 - protein, 248 aa, Neisseria; identical to SEQ ID NO: 419

SEQ ID NO: 423 - protein, 193 aa, Neisseria
  VARIANT (1)...(193): Xaa = Any Amino Acid
LKECRLKDPVFIPNIVYKNIAITFLLLHAAAELWLPAQTAGFTALAVGFILLAKLRELHHHELLRKHYVRTYYLLQLFAAAGSLWTGAAXLQNLPASAPLHLITLGGMMGGVMMVWLTAGLWHSGFTKLDYPKLCRIAVPILFAAAVSRAFLXNVNPXFFITVPAILTAAVFVLYLFXFIPIFRANAFTDDPE

SEQ ID NO: 424 - protein, 357 aa, Neisseria
MRPFFVGAAVLAILGALVFFINPGAIVLHRQIFLELMLPAAYGGFLTAALLDWTGFSGNLKPVATLMAALLLAASAILPFSPQTASFFVAAYWLVLLLFCARLIWLDRNTDNFALLMLLAAFTVFQTAYAVSGDLNLLRAQVHLNMAAVMFVSVRVSILLGAEALKECRLKDPVFIPNIVYKNIAITFLLLHAAAELWLPAQTAGFTALAVGFILLAKLRELHHHELLRKHYVRTYYLLQLFAAAGYLWTGAAKLQNLPASAPLHLITLGGMMGGVMMVWLTAGLWHSGFTKLDYPKLCRIAVPILFAAAVSRAFLMNVNPIFFITVPAILTAAVFVLYLFTFIPIFRANAFTDDPE

SEQ ID NO: 425 - protein, 357 aa, Neisseria
MRPFFVGAAVLAILGALVFFINPGAIVLHRQIFLELMLPAAYGGFLTAALLDWTGFSGNLKPVATLMAALLLAASAILPFSPQTASFFVAAYWLVLLLFCARLIWLDRNTDNFALLMLLAAFTVFQTAYAVSGDLNLLRAQVHLNMAAVMFVSVRVSILLGAEALKECRLKDPVFIPNVVYKNIAITFLLLHAAAELWLPAQTAGFTSLAVGFILLAKLRELHHHELLRKHYVRTYYLLQLFAAAGYLWTGAAKLQNLPASAPLHLITLGGMMGSVMMVWLTAGLWHSGFTKLDYPKLCRIAVPILFAAAVSRAVLMNVNPIFFITVPAILTAAVFVLYLLTFVPIFRANAFTDDPE

SEQ ID NO: 426 - protein, 364 aa, Neisseria
MNKFFTHPMRPFFVGAAVLAILGALVFFHQPRRYHPAPPNFLGTYAAGCIRRFFDYRFVGPDGFFRQPETCRYFDGGVVACCGCFIAVFTATCRIFRRRLLAGVAAVLRLADLARRQHRTLRSVDVTAAFTVFQTAYAVSGDLNLLRAQVHLNMAAVMFVSVRVSVLLGTETLKECRLKDPVFIPNVIYKNIAITLLLHAAAELWLPAQTAGFTALAVGFILLAKLRELHHHELLRKHYVRTYYLLQLFAAAGYLWTGAAKLQNLPASAPLHLITLGGMTGGVMMVWLTAGLWHSGFTKLDYPKLCRIAVSILFASAVSRAVLMNVNPIFFITVPEILTAAVFMLYLLTFVPIFRANAFTDDPE

SEQ ID NO: 427 - protein, 356 aa, Neisseria
MRPFFVGAAVLAILGALVFFINPGAIILHRQIFLELMLPAAYGGFLTTALLDRTGFSGNLKPAATLMAVLLLVAAVLLPFLPQLAAFFVAAYWLVLLLFCAWLIWLDRNTDNFALLMLLAAFTVFQTAYAVSGDLNLLRAQVHLNMAAVMFVSVRVSVLLGTETLKECRLKDPVFIPNVIYKNIAITLLLHAAAELWLPAQTAGFTALAVGFILLAKLRELHHHELLRKHYVRTYYLLQLFAAAGYLWTGAAKLQNLPASAPLHLITLGGMTGGVMMVWLTAGLWHSGFTKLDYPKLCRIAVSILFASAVSRAVLMNVNPIFFITVPEILTAAVFMLYLLTFVPIFRANAFTDDPE

SEQ ID NO: 428 - protein, 121 aa, Neisseria
  VARIANT (1)...(121): Xaa = Any Amino Acid
MEIRAIKYTAMAALLAFTVAGCRLAGWYECSSLTGWCKPRKPAAIDFWDIGGESPPSLGDYEIPLSDGNSSVRANEYESAQQSYFYRKIGKFEXCGLDWRTRDGKPLIETFKQGGFDCLEK

SEQ ID NO: 429 - protein, 135 aa, Neisseria
MEIRAIKYTAMAALLAFTVAGCRLAGWYECSSLTGWCKPRKPAAIDFWDIGGESPPSLGDYEIPLSDGNRSVRANEYESAQQSYFYRKIGKFEACGLDWRTRDGKPLIETFKQGGFDCLEKQGLRRNGLSERVRW

SEQ ID NO: 430 - protein, 135 aa, Neisseria
MEIRAIKYTAMAALLAFTVAGCRLAGWYECSSLSGWCKPRKPAAIDFWDIGGESPPSLEDYEIPLSDGNRSVRANEYESAQQSYFYRKIGKFEACGLDWRTRDGKPLIETFKQEGFDCLKKQGLRRNGLSERVRW

SEQ ID NO: 431 - protein, 135 aa, Neisseria
MEIRVIKYTATAALFAFTVAGCRLAGWYECLSLSGWCKPRKPAAIDFWDIGGESPLSLEDYEIPLSDGNRSVRANEYESAQKSYFYRKIGKFEACGLDWRTRDGKPLVERFKQEGFDCLEKQGLRRNGLSERVRW

SEQ ID NO: 432 - protein, 135 aa, Neisseria
MEIRVIKYTATAALFAFTVAGCRLAGWYECSSLSGWCKPRKPAAIDFWDIGGESPLSLEDYEIPLSDGNRSVRANEYESAQKSYFYRKIGKFEACGLDWRTRDGKPLVERFKQEGFDCLEKQGLRRNGLSERVRW

SEQ ID NO: 433 - protein, 259 aa, Neisseria
  VARIANT (1)...(259): Xaa = Any Amino Acid
MKHIHIIGIGGTFMGGLAAIAKEAGFEVSGCDAKMYPPMSTQLEALGIDVYEGFDAAQLDEFKADVYVIGNVAKRGMDVVEAILNLGLPYISGPQWLSENVLHHHWVLGVAGTHGKTTTASMLAWVLEYAGLAPGFLIGGVXGKFRRFRPPAANAAPRPEQPIAVFRHRSRRIRHRLFRQTFXIRALPSAYRRVEQSGIRPRRHLCRLGRDTDPVPLPRAYRAVXRLNRLQRTAAKPARYFGQRLLDAGGKIRHGTRLA

SEQ ID NO: 434 - protein, 458 aa, Neisseria
MKHIHIIGIGGTFMGGLAAIAKEAGFEVSGCDAKMYPPMSTQLEALGIDVYEGFDAAQLDEFKADVYVIGNVAKRGMDVVEAILNLGLPYISGPQWLSENVLHHHWVLGVAGTHGKTTTASMLAWVLEYAGLAPGFLIGGVPENFGVSARLPQTPRQDPNSQSPFFVIEADEYDTAFFDKRSKFVHYRPRTAVLNNLEFDHADIFADLGAIQTQFHYLVRTVPSEGLIVCNGRQQSLQDTLDKGCWTPVEKFGTEHGWQAGEANADGSFDVLLDGKTAGRVKWDLMGRHNRMNALAVIAAARHVGVDIQTACEALGAFKNVKRRMEIKGTANGITVYDDFAHHPTAIETTIQGLRQRVGGARILAVLEPRSNTMKLGTMKSALPVSLKEADQVFCYAGGVDWDVAEALAPLGGRLNVGKDFDAFVAEIVKNAEVGDHILVMSNGGFGGIHGKLLEALR

SEQ ID NO: 435 - protein, 458 aa, Neisseria
  VARIANT (1)...(458): Xaa = Any Amino Acid
MKHIHIIGIGGTFMGGIAAIAKEAGFEXSGCDAKMYPPMSTQLEALGIGVYEGFDTAQLDEFKADVYVIGNVAKRGMDVVEAILNRGLPYISGPQWLAENXLHHHWXLGVAXTHGKTTTASMLAWVLEYAGLAPGFXIGGVPENFSVSARLPQTPRQDPNSQSPFFVIEADEYDTAFFDKRSKFVHYRPRTAVLNNLEFDHADIFADLGAIQTQFHHLVRTVPSEGLIVCNGRQQSLQDTLDKGCWTPVEKFGTEHGWQAGEANADGSFDVLLDGKKAGHVAWSLMGGHNRMNALAVIAAARHAGVDIQTACEALSTFKNVKRRMEIKGTANGITVYDDFAHHPTAIETTIQGLRQRVGGARILAVLEPRSNTMKLGTMKAALPASLKEADQVFXYAGGADWDVAEALAPLGGRLHVGKDFDAFVAEIVKNAEAGDHILVMSNGGFGGIHTKLLDALR

SEQ ID NO: 436 - protein, 261 aa, Neisseria
MKHIHIIGIGGTFMGGIAAIAKEAGFKVSGCDAKMYPPMSTQLEALGIGVHEGFDAAQLEEFQADIYVIGNVARRGMDVVEAILNRGLPYISGPQWLAENVLHHHWVLGVAGTHGKTTTASMLAWVLEYAGLAPGFLIGGVPGKFRRFRPPTANAASRPEQQIAVFRHRSRRIRHRLFRQTLQIRALSPAYRRVEQSGIRPRRHLRRLGRDTDPVPPPRAHRTIRRPHRLQRTAAKPARYFGQRLLDAGGKIRHRTRLADW

SEQ ID NO: 437 - protein, 458 aa, Neisseria
MKHIHIIGIGGTFMGGIAAIAKEAGFKVSGCDAKMYPPMSTQLEALGIGVHEGFDAAQLEEFQADIYVIGNVARRGMDVVEAILNRGLPYISGPQWLAENVLHHHWVLGVAGTHGKTTTASMLAWVLEYAGLAPGFLIGGVPENFGVSARLPQTPRQDPNSKSPFFVIEADEYDTAFFDKRSKFVHYRPRTAVLNNLEFDHADIFADLGAIQTQFHHLVRTVPSEGLIVCNGQQQSLQDTLDKGCWTPVEKFGTGHGWQIGEVNADGSFDVLLDGKKAGHVAWDLMGGHNRMNALAVIAAARHAGVDVQTACEALGAFKNVKRRMEIKGTANGITVYDDFAHHPTAIETTIQGLRQRVGGARILAVLEPRSNTMKLGTMKSALPASLKEADQVFCYAGGADWDVAEALAPLGCRLRVGKDFDTFVAEIVKNARTGDHILVMSNGGFGGIHTKLLDALR

SEQ ID NO: 438 - protein, 393 aa, Neisseria
  VARIANT (1)...(393): Xaa = Any Amino Acid
PGYYGSDDEFKRAFGENSPTXKKHCNRSCGIYEPVLKKYGKKRANNHSVSISADFGDYFMPFASYSRTHRMPNIQEMYFSQIGDSGVHTALKPERANTWQFGFXTYKKGLLKQDDTLGLKLVGYRSRIDNYIHNVYGKWWDLNGDIPSWVSSTGLAYTIQHRXFXDKVHQXXXXXXXXYDYGRFFTNLSYAYQKSTQPTNFSDASESPNNASKEDQLKQGYGLSRVSALPRDYGRLEVGTRWLGNKLTLGGAMRYFGKSIRATAEERYIDGTNGGNTSNFRQLGKRSIKQTETLARQPLIXDFNAAYEPKKNLIFRAEVKNLFDRRYIDPLDAGNDAAXERYYSSFDPKDKDXDVTCNADKTLCNGKYGGTSKSVLTNFARGRTFLMTMSYKF

SEQ ID NO: 439 - protein, 888 aa, Neisseria
  VARIANT (1)...(888): Xaa = Any Amino Acid
EAQIQVLEDVHVKAKRVPKDKKVFTDARAVSTRQDIFKSSENLDNIVRSIPGAFTQQDKSSGIVSLNIRGDSGFGRVNTMVDGITQTFYSTSTDAGRAGGSSQFGASVDSNFIAGLDVVKGSFSGSAGINSLAGSANLRTLGVDDVVQGNNTYGLLLKGLTGTNSTKGNAMAAIGARKWLESGASVGVLYGHSRRSVAQNYRVGGGGQHIGNFGAEYLERRKQRYFVQEGALKFNSDSGKWERDLQRQQWKYKPYKNYNNQELQKYIEEHDKSWRENLXPQYDITPIDPSSLKQQSAGNLFKLEYDGVFNKYTAQFRDLNTKIGSRKIINRNYQFNYGLSLNPYTNLNLTAAYNSGRQKYPKGSKFTGWGLLKDFETYNNAKILDLNNTATFRLPRETELQTTLGFNYFHNEYGKNRFPEELGLFFDGPDQDNGLYSYLGRFKGDKGLLPQKSTIVQPAGSQYFNTFYFDAALKKDIYRLNYSTNTVGYRFGGEYTGYYGSDDEFKRAFGENSPTYKKHCNRSCGIYEPVLKKYGKKRANNHSVSISADFGDYFMPFASYSRTHRMPNIQEMYFSQIGDSGVHTALKPERANTWQFGFNTYKKGLLKQDDTLGLKLVGYRSRIDNYIHNVYGKWWDLNGDIPSWVSSTGLAYTIQHRNFKDKVHKHGFELELNYDYGRFFTNLSYAYQKSTQPTNFSDASESPNNASKEDQLKQGYGLSRVSALPRDYGRLEVGTRWLGNKLTLGGAMRYFGKSIRATAEERYIDGTNGGNTSNFRQLGKRSIKQTETLARQPLIFDFYAAYEPKKNLIFRAEVKNLFDRRYIDPLDAGNDAATQRYYSSFDPKDKDEDVTCNADKTLCNGKYGGTSKSVLTNFARGRTFLMTMSYKF

SEQ ID NO: 440 - protein, 871 aa, Neisseria
  VARIANT (1)...(871): Xaa = Any Amino Acid
KDKKVFTDARAVSTRQDIFKSXENLDNIVRXIPGAFTXQXKSSGXVSLNIRXDSGFGRVNTMVDGITXTFYSTSTDAGRAGGSSQFGASVDSNFXAGLDVVKGSFSGSAGINSLAGSANLRTLXVDDVVQGNXTYGLLLKGLTGTNSTKGNAMAAIGARKWLESGASVGVLYGHSRRSVAQNYRVGGGGQHIGNFGAEYLERRKQRYFEQEGGLKFNSNSGKWERDFQKSYWKTKWYQKYDAPQELQKYIEGHDKSWRENLAPQYDITPIDPSSLKXQSAGNLFKLEYDGVFNKYTAQFRDLNTKIGSRKIINRNYQFNYGLSLNPYTNLNLTAAYNSGRQKYPKGSKFTGWGLXKDFETYNNAKILDLXNTSTFRLPRETELQTTLGFNYFHNEYGKNRFPEELGLFFDGPDXDNGLYSYLGRFKGDKGLLPQKSTIVQPAGSQYFNTFYFDAALKKDIYRLNYSTNTVGYRFGGXYTGYYXSDDEFKRAFGENSPTYXKHCNQSCGIYEPVLKKYGKKRANNHSVSISADFGDYFMPFASYSRTHRMPNIQEMYFSQIGDSGVHTALKPERANTWQFGFNTYKKGLLKQDDILGLKLVGYRSRIDXYIHNVYGKWWDLNGNIPSWVSSTGLAYTIQHRNFKDKVHKHGFELELNYDYXRFFTNLSYAYQKSTQPTNFSDASESPNNASKEDQLKQGYGLSRVSALPRDYGRLEVGTRWLGNKLTLGGAMRYFGKSIRATAEERYIDXTNGXXTSNFRQLGKRSIXQTETLARQPLIFDXYAAYEPKKXLIFRAEVKNLFDRRYIDPLDAGNDAATQRYYSSFDPKDKDEEVTCNDDNTLCNGKYGGTSKSVLTNFARGXTFLITMSYKF

SEQ ID NO: 441 - protein, 922 aa, Neisseria
MRSSFRLKPICFYLMGVMLYHHSYAEDAGRAGSEAQIQVLEDVHVKAKRVPKDKKVFTDARAVSTRQDVFKSGENLDNIVRSIPGAFTQQDKSSGIVSLNIRGDSGFGRVNTMVDGITQTFYSTSTDAGRAGGSSQFGASVDSNFIAGLDVVKGSFSGSAGINSLAGSANLRTLGVDDVVQGNNTYGLLLKGLTGTNSTKGNAMAAIGARKWLESGASVGVLYGHSRRGVAQNYRVGGGGQHIGNFGEEYLERRKQQYFVQEGGLKFNAGSGKWERDLQRQYWKTKWYKKYEDPQELQKYIEEHDKSWRENLAPQYDITPIDPSGLKQQSAGNLLNLEYDGVFNKYTAQFRDLNTRIGSRKIINRNYQFNYGLSLNPYTNLNLTAAYNSGRQKYPKGAKFTGWGLLKDFETYNNAKILDLNNTATFRLPRETELQTTLGFNYFHNEYGKNRFPEELGLFFDGPDQDNGLYSYLGRFKGDKGLLPQKSTIVQPAGSQYFNTFYFDAALKKDIYRLNYSTNAINYRFGGEYTGYYGSENEFKRAFGENSPAYKEHCDPSCGLYEPVLKKYGKKRANNHSVSISADFGDYFMPFAGYSRTHRMPNIQEMYFSQIGDSGVHTALKPERANTWQFGFNTYKKGLLKQDDILGLKLVGYRSRIDNYIHNVYGKWWDLNGDIPSWVGSTGLAYTIRHRNFKDKVHKHGFELELNYDYGRFFTNLSYAYQKSTQPTNFSDASESPNNASKEDQLKQGYGLSRVSALPRDYGRLEVGTRWLGNKLTLGGAMRYFGKSIRATAEERYIDGTNGGNTSNVRQLGKRSIKQTETLARQPLIFDFYAAYEPKKNLIFRAEVKNLFDRRYIDPLDAGNDAATQRYYSSFDPKDKDEDVTCNADKTLCNGKYGGTSKSVLTNFARGRTFLMTMSYKF

SEQ ID NO: 442 - protein, 922 aa, Neisseria
MRSSFRLKPICFYLMGVMLYHHSYAEDAGRAGSEAQIQVLEDVHVKAKRVPKDKKVFTDARAVSTRQDVFKSGENLDNIVRSIPGAFTQQDKSSGIVSLNIRGDSGFGRVNTMVDGITQTFYSTSTDAGRAGGSSQFGASVDSNFIAGLDVVKGSFSGSAGINSLAGSANLRTLGVDDVVQGNNTYGLLLKGLTGTNSTKGNAMAAIGARKWLESGASVGVLYGHSRRGVAQNYRVGGGGQHIGNFGEEYLERRKQQYFVQEGGLKFNAGSGKWERDLQRQYWKTKWYKKYEDPQELQKYIEEHDKSWRENLAPQYDITPIDPSGLKQQSAGNLFKLEYDGVFNKYTAQFRDLNTRIGSRKIINRNYQFNYGLSLNPYTNLNLTAAYNSGRQKYPKGAKFTGWGLLKDFETYNNAKILDLNNTATFRLPRETELQTTLGFNYFHNEYGKNRFPEELGLFFDGPDQDNGLYSYLGRFKGDKGLLPQKSTIVQPAGSQYFNTFYFDAALKKDIYRLNYSTNAINYRFGGEYTGYYGSENEFKRAFGENSPAYKEHCDPSCGLYEPVLKKYGKKRANNHSVSISADFGDYFMPFAGYSRTHRMPNIQEMYFSQIGDSGVHTALKPERANTWQFGFNTYKKGLLKQDDILGLKLVGYRSRIDNYIHNVYGKWWDLNGDIPSWVGSTGLAYTIRHRNFKDKVHKHGFELELNYDYGRFFTNLSYAYQKSTQPTNFSDASESPNNASKEDQLKQGYGLSRVSALPRDYGRLEVGTRWLGNKLTLGGAMRYFGKSIRATAEERYIDGTNGGNTSNVRQLGKRSIKQTETLARQPLIFDFYAAYEPKKNLIFRAEVKNLFDRRYIDPLDAGNDAATQRYYSSFDPKDKDEDVTCNADKTLCNGKYGGTSKSVLTNFARGRTFLMTMSYKF

SEQ ID NO: 443 - protein, 166 aa, Neisseria
MNLISRYIIRQMAVMAVYALLAFLALYSFFEILYETGNLGKGSYGIWEMLGYTALKMPARAYELIPLAVLIGGLVSLSQLAAGSELTVIKASGMSTKKLLLILSQFGFIFAIATVALGEWVAPTLSQKAENIKAAAINGKISTGNTGLWLKEKNSVINVREMLPDH

SEQ ID NO: 444 - protein, 326 aa, Neisseria
  VARIANT (1)...(326): Xaa = Any Amino Acid
MNLISRYIIRQMAVMAVYALLAFLALYSFFEILYETGNLGKGSYGIWEMLGYTALKMPARAYELIPLAVLIGGLVSLSQLAAGSELTVIKASGMSTKKLLLILSQFGFIFAIATVALGEWVAPTLSQKAENIKAAAINGKISTGNTGLWLKEKNSXINVREMLPDHTLLGIKIWARNDKNELAEAVEADSAVLNSDGSWQLKNIRRSTLGEDKVEVSIAAEENWPISVKRNLMDVLLVKPDQMSVGELTTYIRHLQNNSQNTRIYAIAWWRKLVYPAAAWVMALVAFAFTPQTTRHGNMGLKLFGGICXGLLFHLAGRLFGFTSQL

SEQ ID NO: 445 - protein, 356 aa, Neisseria
  VARIANT (1)...(356): Xaa = Any Amino Acid
MNLISRYIIRQMAVMAVYALLAFLALYSFFEILYETGNLGKGSYGIWEMXGYTALKMXARAYELMPLAVLIGGLVSXSQLAAGSELXVIKASGMSTKKLLLILSQFGFIFAIATVALGEWVAPTLSQKAENIKAAAINGKISTGNTGLWLKEKNSIINVREMLPDHTLLGIKIWARNDKNELAEAVEADSAVLNSDGSWQLKNIRRSTLGEDKVEVSIAAEEXWPISVKRNLMDVLLVKPDQMSVGELTTYIRHLQXXSQNTRIYAIAWWRKLVYPAAAWVMALVAFAFTPQTTRHGNMGLKXFGGICLGLLFHLAGRLFXFTSQLYGIPPFLXGALPTIAFALLAVWLIRKQEKR

SEQ ID NO: 446 - protein, 356 aa, Neisseria
MNLISRYIIRQMAVMAVYALLAFLALYSFFEILYETGNLGKGSYGIWEMLGYTALKMPARAYELMPLAVLIGGLASLSQLAAGSELAVIKASGMSTKKLLLILSQFGFIFAIAAVALGEWVAPTLSQKAENIKAAAINGKISTGNTGLWLKEKTSIINVRGMLPDHTLLGIKIWARNDKNELAEAVEADSAVLNSDGSWQLKNIRRSIMGTDKIETSAAAEETWPIAVRRNLMDVLLVKPDQMSVGELTTYIRHLQNNSQNTQIYAIAWWRKLVYPVAAWVMALVAFAFTPQTTRHGNMGLKLFGGICLGLLFHLAGRLFGFTSQLYGTPPFLAGALPTIAFALLAVWLIRKQEKR

SEQ ID NO: 447 - protein, 245 aa, Neisseria
  VARIANT (1)...(245): Xaa = Any Amino Acid
TLLFATVQASANQEEQEEDLYLDPVQRTVAVLIVNSDKEGTGEKEKVEENSDWAVYFNEKGVLTAREITXKAGDNLKIKQNGTNFTYSLKKDLTDLTSVGTEKLSFSANGNKVNITSDTKGLNFAKETAGTNGDTTVHLNGIGSTLTDTLLNTGATTNVTNDNVTDDEKKRAASVKDVLNAGWNIKGVKPGTTASDNVDFVRTYDTVEFLSADTKTTTVNVESKDNGKKTEVKIGAKTSVIKEKD

SEQ ID NO: 448 - protein, 591 aa, Neisseria
MNKIYRIIWNSALNAWVVVSELTRNHTKRASATVKTAVLATLLFATVQASANNEEQEEDLYLDPVQRTVAVLIVNSDKEGTGEKEKVEENSDWAVYFNEKGVLTAREITLKAGDNLKIKQNGTNFTYSLKKDLTDLTSVGTEKLSFSANGNKVNITSDTKGLNFAKETAGTNGDTTVHLNGIGSTLTDTLLNTGATTNVTNDNVTDDEKKRAASVKDVLNAGWNIKGVKPGTTASDNVDFVRTYDTVEFLSADTKTTTVNVESKDNGKKTEVKIGAKTSVIKEKDGKLVTGKDKGENGSSTDEGEGLVTAKEVIDAVNKAGWRMKTTTANGQTGQADKFETVTSGTNVTFASGKGTTATVSKDDQGNITVMYDVNVGDALNVNQLQNSGWNLDSKAVAGSSGKVISGNVSPSKGKMDETVNINAGNNIEITRNGKNIDIATSMTPQFSSVSLGAGADAPTLSVDGDALNVGSKKDNKPVRITNVAPGVKEGDVTNVAQLKGVAQNLNNRIDNVDGNARAGIAQAIATAGLVQAYLPGKSMMAIGGGTYRGEAGYAIGYSSISDGGNWIIKGTASGNSRGHFGASASVGYQW

SEQ ID NO: 449 - protein, 592 aa, Neisseria
  VARIANT (1)...(592): Xaa = Any Amino Acid
MNKIYRIIWNSALNAXVAVSELTRNHTKRASATVKTAVLATLLFATVQANATDEDEEEELESVQRSVVGSIQASMEGSGELETISLSMTNDSKEFVDPYIVVTLKAGDNLKIKQNTNENTNASSFTYSLKKDLTGLINVXTEKLSFGANGKKVNIISDTKGLNFAKETAGTNGDTTVHLNGIGSTLTDTLAGSSASHVDAGNXSTHYTRAASIKDVLNAGWNIKGVKXGSTTGQSENVDFVRTYDTVEFLSADTXTTTVNVESKDNGKRTEVKIGAKTSVIKEKDGKLVTGKGKGENGSSTDEGEGLVTAKEVIDAVNKAGWRMKTTTANGQTGQADKFETVTSGTNVTFASGKGTTATVSKDDQGNITVMYDVNVGDALNVNQLQNSGWNLDSKAVAGSSGKVISGNVSPSKGKMDETVNINAGNNIEISRNGKNIDIATSMAPQFSSVSLGAGADAPTLSVDDEGALNVGSKDANKPVRITNVAPGVKXGDVTNVXQLKGVAQNLNNRIDNVDGNARAGIAQAIATAGLVQAYLPGKSMMAIGGGTYRGEAGYAIGYSSISDGGNWIIKGTASGNSRGHFGASASVGYQW

SEQ ID NO: 450 - protein, 164 aa, Neisseria
  VARIANT (1)...(164): Xaa = Any Amino Acid
MLRLTALAVCTALALGACSPQNSDSAPQAKEQAVSAAQTEGASVTVKTARGDVQIPQNPERIAVYDLGMLDTLSKLGVKTGLSVDKNRLPYLEEYFKTTKPAGTLFEPDYETLNAYKPQLIIIGSRAAKAFDKLNEIAPTIXXTADTANLKESAKEASTLAQIF

SEQ ID NO: 451 - protein, 321 aa, Neisseria
MLRLTALAVCTALALGACSPQNSDSAPQAKEQAVSAAQTEGASVTVKTARGDVQIPQNPERIAVYDLGMLDTLSKLGVKTGLSVDKNRLPYLEEYFKTTKPAGTLFEPDYETLNAYKPQLIIIGSRAAKAFDKLNEIAPTIEMTADTANLKESAKERIDALAQIFGKQAEADKLKAEIDASFEAAKTAAQGKGKGLVILVNGGKMSAFGPSSRLGGWLHKDIGVPAVDESIKEGSHGQPISFEYLKEKNPDWLFVLDRSAAIGEEGQAAKDVLDNPLVAETTAWKKGQVVYLVPETYLAAGGAQELLNASKQVADAFNAAK

SEQ ID NO: 452 - protein, 321 aa, Neisseria
MLRLTALAVCTALALGACSPQNSDSAPQAKEQAVSAAQSEGVSVTVKTARGDVQIPQNPERIAVYDLGMLDTLSKLGVKTGLSVDKNRLPYLEEYFKTTKPAGTLFEPDYETLNAYKPQLIIIGSRAAKAFDKLNEIAPTIEMTADTANLKESAKERIDALAQIFGKKAEADKLKAEIDASFEAAKTAAQGKGKGLVILVNGGKMSAFGPSSRLGGWLHKDIGVPAVDEAIKEGSHGQPISFEYLKEKNPDWLFVLDRSAAIGEEGQAAKDVLNNPLVAETTAWKKGQVVYLVPETYLAAGGAQELLNASKQVADAFNAAK

SEQ ID NO: 453 - protein, 124 aa, Neisseria
MKLLTTAILSSAIALSSMAAAAGTDNPTVAKKTVSYVCQQGKKVKVTYGFNKQGLTTYASAVINGKRVQMPVNLDKSDNVETFYGKEGGYVLGTGVMDGKSYRKQPIMITAPDNQIVFKDCSPR

SEQ ID NO: 454 - protein, 124 aa, Neisseria
MKLLTTAILSSAIALSSMAAAAGTNNPTVAKKTVSYVCQQGKKVKVTYGFNKQGLTTYASAVINGKRVQMPVNLDKSDNVETFYGKEGGYVLGTGVMDGKSYRKQPIMITAPDNQIVFKDCSPR

SEQ ID NO: 455 - protein, 173 aa, Neisseria
  VARIANT (1)...(173): Xaa = Any Amino Acid
GTEFKTTLSGADIQAGVGEKARADAKIILKGIVNRIQTEEKLESNSTVWQKQAGSGSTVETLKLPSFEGPALPKLTAPGGYIADIPKGNLKTEIEKLAKQPEYAYLKQLQTVKDVNWNQVQLAYDKWDYKQEGLTGAGAAIXALAVTVVTSGAGTGAVLGLXRVAAAATDAAF

SEQ ID NO: 456 - protein, 640 aa, Neisseria
MQLLAAEGIHQHQLNVQKSTRFIGIKVGKSNYSKNELNETKLPVRVIAQTAKTRSGWDTVLEGTEFKTTLSGADIQAGVGEKARADAKIILKGIVNRIQTEEKLESNSTVWQKQAGSGSTVETLKLPSFEGPALPKLTAPGGYIADIPKGNLKTEIEKLAKQPEYAYLKQLQTVKDVNWNQVQLAYDKWDYKQEGLTGAGAAIIALAVTVVTSGAGTGAVLGLNGAAAAATDAAFASLASQASVSFINNKGNIGNTLKELGRSSTVKNLMVAVATAGVADKIGASALNNVSDKQWINNLTVNLANAGSAALINTAVNGGSLKDNLEANILAALVNTAHGEAASKIKQLDQHYIAHKIAHAIAGCAAAAANKGKCQDGAIGAAVGEILGETLLDGRDPGSLNVKDRAKIIAKAKLAAGAVAALSKGDVSTAANAAAVAVENNSLNDIQDRLLSGNYALCMSAGGAESFCESYRPLGLPHFVSVSGEMKLPNKFGNRMVNGKLIINTRNGNVYFSVGKIWSTVKSTKSNISGVSVGWVLNVSPNDYLKEASMNDFRNSNQNKAYAEMISQTLVGESVGGSLCLTRACFSVSSTISKSKSPFKDSKIIGEIGLGSGVAAGVEKTIYIGNIKDIDKFISANIKK

SEQ ID NO: 457 - protein, 761 aa, Neisseria
  VARIANT (1)...(761): Xaa = Any Amino Acid
XQLLAEEGIHKHELDVQKSRRFIGIKVGXSNYSKNELNETKLPVRVVAQXAATRSGWDTVLEGTEFKTTLAGADIQAGVXEKARVDAKIILKGIVNRIQSEEKLETNSTVWQKQAGRGSTIETLKLPSFESPTPPKLSAPGGYIVDIPKGNLKTEIEKLSKQPEYAYLKQLQVAKNINWNQVQLAYDRWDYKQEGLTEAGAAIIALAVTVVTSGAGTGAVLGLNGAXAAATDAAFASLASQASVSFINNKGDVGKTLKELGRSSTVKNLVVAAATAGVADKIGASALXNVSDKQWINNLTVNLANAGSAALINTAVNGGSLKDXLEANILAALVNTAHGEAASKIKQLDQHYIVHKIAHAIAGCAAAAANKGKCQDGAIGAAVGEIVGEALTNGKNPDTLTAKEREQILAYSKLVAGTVSGVVGGDVNAAANAAEVAVKNNQLSDXEGREFDNEMTACAKQNXPQLCRKNTVKKYQNVADKRLAASIAICTDISRSTECRTIRKQHLIDSRSLHSSWEAGLIGKDDEWYKLFSKSYTQADLALQSYHLNTAAKSWLQSGNTKPLSEWMSDQGYTLISGVNPRFIPIPRGFVKQNTPITNVKYPEGISFDTNLXRHLANADGFSQEQGIKGAHNRTNXMAELNSRGGXVKSETXTDIEGITRIKYEIPTLDRTGKPDGGFKEISSIKTVYNPKXFXDDKILQMAQXAXSQGYSKASKIAQNERTKSISERKNVIQFSETFDGIKFRXYXDVNTGRITNIHPE

SEQ ID NO: 458 - protein, 111 aa, Neisseria
RIVVGLRISCAVVTVVPSITQGFVFAFHSDKGYDALVGIAVLGTFVHPTHICLRILIAASWLLIFLPSRFSTSRLRASAYLSANAISFGCSCLLFQSTFAPTTAPPLPPVA

SEQ ID NO: 459 - protein, 571 aa, Neisseria
  VARIANT (1)...(571): Xaa = Any Amino Acid
KFDFTWFIPAVIKYRRLFFEVLVVSVVLQLFALITPLFFQVVMDKVLVHRGFSTLDVVSVALLVVSLFEIVLGGLRTYLFAHTTSRIDVELGARLFRHLLSLPLSYFEHRRVGDTVARVRELEQIRNFLTGQALTSVLDLAFSFIFLAVMWYYSSTLTWVVLASLXXXXXXXXXXXXXXXXXXXXXXXXXXXXXXXXXXXXXXXXXXXXXXXXXXXXXXXXXXXXXXXXXXXXXXXXXXXXXXXXXXXXXXXXXXXXXXXXXXXXXXXXXXXXXXXXXXXXXXXXXXXXXXXXXXXXXXXXXXXXXXXXXXXXXXXXXXXXXXXXXXXXXXXXXXXXXXXXXXXXXXXXXXXXXXXXXXXXXXXXXXXXXXXXXXXXXXXXXXXXXXXXXXXXXXXXXXXXXXXXXXXXXXXXXXXXXXXXXXXXXXXXXXXXXXXXXXXXXXXXXXXXXXXXXXXXXXXXXXXXXXXXXXXXXXXXXXXXXXXXXXXXXXXXXXXXXXXXXXXXXXXXXXXXXICANRTVLIIAHRLSTVKTAHRIIAMDKGRIVEAGTQQELLANXNGYYRYLYDLQNG

SEQ ID NO: 460 - protein, 710 aa, Neisseria
MSIVSAPLPALSALIILAHYHGIAANPADIQHEFCTSAQSDLNETQWLLAAKSLGLKAKVVRQPIKRLAMATLPALVWCDDGNHFILAKTDGEGEHAQFLIQDLVTNKSAVLSFAEFSNRYSGKLILVASRASVLGSLAKFDFTWFIPAVIKYRRLFFEVLVVSVVLQLFALITPLFFQVVMDKVLVHRGFSTLDVVSVALLVVSLFEIVLGGLRTYLFAHTTSRIDVELGARLFRHLLSLPLSYFEHRRVGDTVARVRELEQIRNFLTGQALTSVLDLAFSFIFLAVMWYYSSTLTWVVLASLPAYAFWSAFISPILRTRLNDKFARNADNQSFLVESITAVGTVKAMAVEPQMTQRWDNQLAAYVASGFRVTKLAVVGQQGVQLIQKLVTVATLWIGARLVIESKLTVGQLIAFNMLSGQVAAPVIRLAQLWQDFQQVGISVARLGDILNAPTENASSHLALPDIRGEITFEHVDFRYKADGRLILQDLNLRIRAGEVLGIVGRSGSGKSTLTKLVQRLYVPEQGRVLVDGNDLALAAPAWLRRQVGVVLQENVLLNRSIRDNIALTDTGMPLERIIEAAKLAGAHEFIMELPEGYGTVVGEQGAGLSGGQRQRIAIARALITNPRILIFDEATSALDYESERAIMQNMQAICANRTVLIIAHRLSTVKTAHRIIAMDKGRIVEAGTQQELLAKPNGYYRYLYDLQNG

SEQ ID NO: 461 - protein, 710 aa, Neisseria
MSIVSAPLPALSALIILAHYHGIAANPADIQHEFCTSAQSDLNETQWLLAAKSLGLKAKVVRQPIKRLAMATLPALVWCDDGNHFILAKTDGGGEHAQYLIQDLTTNKSAVLSFAEFSNRYSGKLILVASRASVLGSLAKFDFTWFIPAVIKYRRLFFEVLVVSVVLQLFALITPLFFQVVMDKVLVHRGFSTLDVVSVALLVVSLFEIVLGGLRTYLFAHTTSRIDVELGARLFRHLLSLPLSYFEHRRVGDTVARVRELEQIRNFLTGQALTSVLDLAFSFIFLAVMWYYSSTLTWVVLASLPAYAFWSAFISPILRTRLNDKFARNADNQSFLVESITAVGTVKAMAVEPQMTQRWDNQLAAYVASGFRVTKLAVVGQQGVQLIQKLVTVATLWIGARLVIESKLTVGQLIAFNMLSGQVAAPVIRLAQLWQDFQQVGISVARLGDILNAPTENASSHLALPDIRGEITFEHVDFRYKADGRLILQDLNLRIRAGEVLGIVGRSGSGKSTLTKLVQRLYVPAQGRVLVDGNDLALAAPAWLRRQVGVVLQENVLLNRSIRDNIALTDTGMPLERIIEAAKLAGAHEFIMELPEGYGTVVGEQGAGLSGGQRQRIAIARALITNPRILIFDEATSALDYESERAIMQNMQAICANRTVLIIAHRLSTVKTAHRIIAMDKGRIVEAGTQQELLAKPNGYYRYLYDLQNG

SEQ ID NO: 462 - protein, 62 aa, Neisseria
  VARIANT (1)...(62): Xaa = Any Amino Acid
MKYLIRTALLAVAAAGIYACQPQSEAAVQVKAENSLTAMRLAVADKQAEIDGLNAQXDAEIR

SEQ ID NO: 463 - protein, 86 aa, Neisseria
MKYLIRTALLAVAAAGIYACQPQSEAAVQVKAENSLTAMRLAVADKQAEIDGLNAQIDAEIRQREAEELKDYRWIHGDAEVPELEK

SEQ ID NO: 464 - protein, 92 aa, Neisseria
  VARIANT (1)...(92): Xaa = Any Amino Acid
MVIGILLASSKHALVITLLLNPVFHASSCVSRXAIRNKICCSALAKFAKLFIVSLGAACLAAFAFDNAPTGASQALPTVTAPVAIPAPASAA

SEQ ID NO: 465 - protein, 103 aa, Neisseria
MACTGLMVFPLMVIGILLASSKPAPFLTLLLNPVFHASSCVSRWAIRNKICCSALAKFAKLFIVSLGAACLAAFAFDNAPTGASQALPTVTAPVAIPAPASAA

SEQ ID NO: 466 - protein, 85 aa, Neisseria [sequence omitted]

SEQ ID NO: 467 - protein, 78 aa, Neisseria
VRTWLVFWLQRLKYPLLLWIADMLLYRLLGGAEIECGRCPVPPMTDWQHFLPAMGTVSAWVAVIWAYLMIESEKNGRY

SEQ ID NO: 468 - protein, 78 aa, Neisseria
VRTWLVFWLQRLKYPLLLCIADMLLYRLLGGAEIECGRCPVPPMTDWQHFLPTMGTVAAWVAVIWAYLMIESEKNGRY

SEQ ID NO: 469 - protein, 219 aa, Neisseria
  VARIANT (1)...(219): Xaa = Any Amino Acid
MFQNFDLGVFLLAVLPVLPSITVSHVARGYTARYWGDNTAEQYGRLTLNPLPHIDLVGTIIVPLLTLMFTPFLFGWARPIPIDSRNFRNPRLAWRCVAASGPLSNLAMAVLWGVVLVLTPYVGGAYQMPLAQMANYGILINAILFALNIIPILPWDGGIFIDTFLSAKYSQAFRKIEPYGTWIILLLMLTXVLGAFIAPIXRXRDCXCADVRLTGFQTA

SEQ ID NO: 470 - protein, 212 aa, Neisseria
MFQNFDLGVFLLAVLPVLLSITVREVARGYTARYWGDNTAEQYGRLTLNPLPHIDLVGTIIVPLLTLMFTPFLFGWARPIPIDSRNFRNPRLAWRCVAASGPLSNLAMAVLWGVVLVLTPYVGGAYQMPLAQMANYGILINAILFALNIIPILPWDGGIFIDTFLSAKYSQAFRKIEPYGTWIILLLMLTGVLGAFIAPIVRLVIAFVQMFV

SEQ ID NO: 471 - protein, 185 aa, Neisseria
  VARIANT (1)...(185): Xaa = Any Amino Acid
RGYTARYWGDNTAEQYGRLTLNPLPHIDLVGTIIVPLLTLMFTPFLFGWARPIPIDSRNFRNPRLAWRCVAASGPLSNLAMAVLWGVVLVLTPYVGGAYQMPLAQMANYXILINAILXALNIIPILPWDGGIFIDTFLSAKXSQAFRKIEPYGTWIIXLLMLTGVLGAXIAPIVQLVIAFVQMFV

SEQ ID NO: 472 - protein, 166 aa, Neisseria; identical to SEQ ID NO: 443

SEQ ID NO: 473 - protein, 326 aa, Neisseria; identical to SEQ ID NO: 444
  VARIANT (1)...(326): Xaa = Any Amino Acid

SEQ ID NO: 474 - protein, 356 aa, Neisseria; identical to SEQ ID NO: 445
  VARIANT (1)...(356): Xaa = Any Amino Acid

SEQ ID NO: 475 - protein, 284 aa, Neisseria
  VARIANT (1)...(284): Xaa = Any Amino Acid
AVAETANSQGKGKQAGSSVSVSLKTSGDLCGKLKTTLKTLVCSLVSLSMVLPAHAQITTDKSAPKNQQVVILKTNTGAPLVNIQTPNGRGLSHNRXYAFDVDNKGAVLNNDRNNNPFVVKGSAQLILNEVRGTASKLNGIVTVGGQKADVIIANPNGITVNGGGFKNVGRGILTTGAPQIGKDGALTGFDVVKAHWTVXAAGWNDKGGAXYTGVLARAVALQGKXXGKXLAVSTGPQKVDYASGEISAGTAAGTKPTIALDTAALGGMYADSITLIANEKGVGV

SEQ ID NO: 476 - protein, 1978 aa, Neisseria
MNKGLHRIIFSKKHSTMVAVAETANSQGKGKQAGSSVSVSLKTSGDLCGKLKTTLKTLVCSLVSLSMVLPAHAQITTDKSAPKNQQVVILKTNTGAPLVNIQTPNGRGLSHNRYTQFDVDNKGAVLNNDRNNNPFVVKGSAQLILNEVRGTASKLNGIVTVGGQKADVIIANPNGITVNGGGFKNVGRGILTTGAPQIGKDGALTGFDVRQGTLTVGAAGWNDKGGADYTGVLARAVALQGKLQGKNLAVSTGPQKVDYASGEISAGTAAGTKPTIALDTAALGGMYADSITLIANEKGVGVKNAGTLEAAKQLIVTSSGRIENSGRIATTADGTEASPTYLSIETTEKGAAGTFISNGGRIESKGLLVIETGEDISLRNGAVVQNNGSRPATTVLNAGHNLVIESKTNVNNAKGPATLSADGRTVIKEASIQTGTTVYSSSKGNAELGNNTRITGADVTVLSNGTISSSAVIDAKDTAHIEAGKPLSLEASTVTSDIRLNGGSIKGGKQLALLADDNITAKTTNLNTPGNLYVHTGKDLNLNVDKDLSAASIHLKSDNAAHITGTSKTLTASKDMGVEAGSLNVTNTNLRTNSGNLHIQAAKGNIQLRNTKLNAAKALETTALQGNIVSDGLHAVSADGHVSLLANGNADFTGHNTLTAKADVNAGSVGKGRLKADNTNITSSSGDITLVAGNGIQLGDGKQRNSINGKHISIKNNGGNADLKNLNVHAKSGALNIHSDRALSIENTKLESTHNTHLNAQHERVTLNQVDAYAHRHLSITGSQIWQNDKLPSANKLVANGVLALNARYSQIADNTTLRAGAINLTAGTALVKRGNINWSTVSTKTLEDNAELKPLAGRLNIEAGSGTLTIEPANRISAHTDLSIKTGGKLLLSAKGGNAGAPSAQVSSLEAKGNIRLVTGETDLRGSKITAGKNLVVATTKGKLNIEAVNNSFSNYFPTQKAAELNQKSKELEQQIAQLKKSSPKSKLIPTLQEERDRLAFYIQAINKEVKGKKPKGKEYLQAKLSAQNIDLISAQGIEISGSDITASKKLNLHAAGVLPKAADSEAAAILIDGITDQYEIGKPTYKSHYDKAALNKPSRLTGRTGVSIHAAAALDDARIIIGASEIKAPSGSIDIKAHSDIVLEAGQNDAYTFLKTKGKSGKIIRKTKFTSTRDHLIMPAPVELTANGITLQAGGNIEANTTRFNAPAGKVTLVAGEELQLLAEEGIHKHELDVQKSRRFIGIKVGKSNYSKNELNETKLPVRVVAQTAATRSGWDTVLEGTEFKTTLAGADIQAGVGEKARADAKIILKGIVNRIQSEEKLETNSTVWQKQAGRGSTIETLKLPSFESPTPPKLTAPGGYIVDIPKGNLKTEIEKLAKQPEYAYLKQLQVAKNVNWNQVQLAYDKWDYKQEGLTRAGAAIVTIIVTALTYGYGATAAGGVAASGSSTAAAAGTAATTTAAATTVSTATAMQTAALASLYSQAAVSIINNKGDVGKALKDLGTSDTVKQIVTSALTAGALNQMGADIAQLNSKVRTELFSSTGNQTIANLGGRLATNLSNAGISAGINTAVNGGSLKDNLGNAALGALVNSFQGEAASKIKTTFSDDYVAKQFAHALAGCVSGLVQGKCKDGAIGAAVGEIVADSMLGGRNPATLSDAEKHKVISYSKIIAGSVAALNGGDVNTAANAAEVAVVNNALNFDSTPTNAKKHQPQKPDKTALEKIIQGIMPAHAAGAMTNPQDKDAAIWISNIRNGITGPIVITSYGVYAAGWTAPLIGTAGKLAISTCMANPSGCTVMVTQAAEAGAGIATGAVTVGNAWEAPVGALSKAKAAKQAIPTQTVKELDGLLQESKNIGAVNTRINIANSTTRYTPMRQTGQPVSAGFEHVLEGHFHRPIANNRSVFTISPNELKVILQSNKVVSSPVSMTPDGQYMRTVDVGKVIGTTSIKEGGQPTTTIKVFTDKSGNLITTYPVKGN

SEQ ID NO: 477 - protein, 1532 aa, Neisseria
  VARIANT (1)...(1532): Xaa = Any Amino Acid
MNKGLHRIIFSKKHSTMVAVAETANSQGKGKQAGSSVSVSLKTSGDLCGKLKTTLKTLVCSLVSLSMXXXXXXQITTDKSAPKNXQVVILKTNTGAPLVNIQTPNGRGLSHNRYTQFDVDNKGAVLNNDRNNNPFLVKGSAQLILNEVRGTASKLNGIVTVGGQKADVIIANPNGITVNGGGFKNVGRGILTIGAPQIGKDGALTGFDVRQGTLTVGAAGWNDKGGADYTGVLARAVALQGKLQGKNLAVSTGPQKVDYASGEISAGTAAGTKPTIALDTAALGGMYADSITLIAXEKGVGVKNAGTLEAAKQLIVTSSGRIENSGRIATTADGTEASPTYLXIETTEKGAXGTFISNGGRIESKGLLVIETGEDIXLRNGAVVQNNGSRPATTVLNAGHNLVIESKTNVNNAKGSXNLSAGGRTTINDATIQAGSSVYSSTKGDTXLGENTRIIAENVTVLSNGSIGSAAVIEAKDTAHIESGKPLSLETSTVASNIRLNNGNIKGGKQLALLADDNITAKTTNLNTPGNLYVHTGKDLNLNVDKDLSAASIHLKSDNAAHITGTSKTLTASKDMGVEAGLLNVTNTNLRTNSGNLHIQAAKGNIQLRNTKLNAAKALETTALQGNIVSDGLHAVSADGHVSLLANGNADFTGHNTLTAKADVXAGSVGKGRLKADNTNITSSSGDITLVAXXGIQLGDGKQRNSINGKHISIKNNGGNADLKNLNVHAKSGALNIHSDRALSIENTKLESTHNTHLNAQHERVTLNQVDAYAHRHLSIXGSQIWQNDKLPSANKLVANGVLAXNARYSQIADNTTLRAGAINLTAGTALVKRGNINWSTVSTKTLEDNAELKPLAGRLNIEAGSGTLTIEPANRISAHTDLSIKTGGKLLLSAKGGNAGAXSAQVSSLEAKGNIRLVTGXTDLRGSKITAGKNLVVATTKGKLNIEAVNNSFSNYFXTQKXXXLNQKSKELEQQIAQLKKSSXKSKLIPTLQEERDRLAFYIQAINKEVKGKKPKGKEYLQAKLSAQNIDLISAQGIEISGSDITASKKLNLHAAGVLPKAADSEAAAILIDGITDQYEIGKPTYKSHYDKAALNKPSRLTGRTGVSIHAAAALDDARIIIGASEIKAPSGSIDIKAHSDIVLEAGQNDAYTFLXTKGKSGXXIRKTKFTSTXXHLIMPAPVELTANGITLQAGGNIEANTTRFNAPAGKVTLVAGEXXQLLAEEGIHKHELDVQKSRRFIGIKVGXSNYSKNELNETKLPVRVVAQXAATRSGWDTVLEGTEFKTTLAGADIQAGVXEKARVDAKIILKGIVNRIQSEEKLETNSTVWQKQAGRGSTIETLKLPSFESPTPPKLSAPGGYIVDIPKGNLKTEIEKLSKQPEYAYLKQLQVAKNINWNQVQLAYDRWDYKQEGLTEAGAAIIALAVTVVTSGAGTGAVLGLNGAXAAATDAAFASLASQASVSFINNKGDVGKTLKELGRSSTVKNLVVAAATAGVADKIGASALXNVSDKQWINNLTVNLANXGQCRTD

SEQ ID NO: 478 - protein, 593 aa, Neisseria
  VARIANT (1)...(593): Xaa = Any Amino Acid
RFIHDEAVGSNIGGGKMIVAAGQDINVRGXSLISDKGIVLKAGHDIDISTAHNRYTGNEYHESXXSGVMGTGGLGFTIGNRKTTDDTDRTNIVHTGSIIGSLNGDTVTVAGNRYRQTGSTVSSPEGRNTVTAKXIDVEFANNRYATDYAHTQEQKGLTVALNVPVVQAAQNFIQAAQNVGKSKNKRVNAMAAANAAWQSYQATQQMQQFAPSSSAGQGQNYNQSPSISVSIXYGEQKSRNEQKRHYTEAAASQIIGKGQTTLAATGSGEQSNINITGSDVIGHAGTXLIADNHIRLQSAKQDGSEQSKNKSSGWNAGVRXKIGNGIRFGITAGGNIGKGKEQGGSTTHRHTHVGSTTGKTTIRSGGDTTLKGVQLIGKGIQADTRNLHIESVQDTETYQSKQQNGNVQVTVGYGFSASGSYRQSKVKADHASVTGQSGIYAGEDGYQIKVRDNTDLKGGIITSSQSAEDKGKNLFQTATLTASDIQNHSRYEGRSFGIGGSFDLNGGWDGTVTDKQGRPTDRISPAAGYGSDGDSKNSTTRSGVNTHNIHITDEAGQLARTGRTAKETEARIYTGIDTETADQHSGHLKNSFD

SEQ ID NO: 479 - protein, 129 aa, Neisseria
TTGSLGGILAGGGTSLAAPYLDKAAENLGPAGKAAVNALGGAAIGYATGGSGGAVVGANVDWNNRQLHPKEMALADKYAEALKREVEKREGRKISSQEAAMRIRRQICVGWTKVPKTAIPTKASYPLSE

SEQ ID NO: 480 - protein, 319 aa, Neisseria
  VARIANT (1)...(319): Xaa = Any Amino Acid
QCRLKSSQFYRRHLLCKYIYRFPIYCPXACVAEDTPYACYLXQLQVTKDVNWNQVXLAYDKWDYKQEGLTGAGAAIIALAVTVVTAGAGAGAALGLNGAAAAATDAAFASLASQASVSLINNKGNIGNTLKELGRSSTVKNLMVAVATAGVADKIGASALNNVSDKQWINNLTVNLANAGSAALINTAVNGGSLKDNLEANILAALVNTAHGEAASKIKQLDQHYITHKIAHAIAGCAAAAANKGKCQDGAIGAAVGEIVGEALTNGKNPDTLTAKEREQILAYSKLVAGTVSGVVGGDVNAAANAAEVAVKNNQLSDK

SEQ ID NO: 481 - protein, 619 aa, Neisseria
MQVNIQIPYILPRCVRAEDTPYACYLKQLQVTKDVNWNQVQLAYDKWDYKQEGLTGAGAAIIALAVTVVTAGAGAGAALGLNGAAAAATDAAFASLASQASVSLINNKGNIGNTLKELGRSSTVKNLMVAVATAGVADKIGASALNNVSDKQWINNLTVNLANAGSAALINTAVNGGSLKDNLEANILAALVNTAHGEAASKIKQLDQHYITHKIAHAIAGCAAAAANKGKCQDGAIGAAVGEIVGEALTNGKNPDTLTAKEREQILAYSKLVAGTVSGVVGGDVNAAANAAEVAVKNNQLSDKEGREFDNEMTACAKQNNPQLCRKNTVKKYQNVADKRLAASIAICTDISRSTECRTIRKQHLIDSRSLHSSWEAGLIGKDDEWYKLFSKSYTQADLALQSYHLNTAAKSWLQSGNTKPLSEWMSDQGYTLISGVNPRFIPIPRGFVKQNTPITNVKYPEGISFDTNLKRHLANADGFSQKQGIKGAHNRTNFMAELNSRGGRVKSETQTDIEGITRIKYEIPTLDRTGKPDGGFKEISSIKTVYNPKKFSDDKILQMAQNAASQGYSKASKIAQNERTKSISERKNVIQFSETFDGIKFRSYFDVNTGRITNIHPE

SEQ ID NO: 482 - protein, 595 aa, Neisseria
  VARIANT (1)...(595): Xaa = Any Amino Acid
YLKQLQVAKNINWNQVQLAYDRWDYKQEGLTEAGAAIIALAVTVVTSGAGTGAVLGLNGAXAAATDAAFASLASQASVSFINNKGDVGKTLKELGRSSTVKNLVVAAATAGVADKIGASALXNVSDKQWINNLTVNLANAGSAALINTAVNGGSLKDXLEANILAALVNTAHGEAASKIKQLDQHYIVHKIAHAIAGCAAAAANKGKCQDGAIGAAVGEIVGEALTNGKNPDTLTAKEREQILAYSKLVAGTVSGVVGGDVNAAANAAEVAVKNNQLSDXEGREFDNEMTACAKQNXPQLCRKNTVKKYQNVADKRLAASIAICTDISRSTECRTIRKQHLIDSRSLHSSWEAGLIGKDDEWYKLFSKSYTQADLALQSYHLNTAAKSWLQSGNTKPLSEWMSDQGYTLISGVNPRFIPIPRGFVKQNTPITNVKYPEGISFDTNLXRHLANADGFSQEQGIKGAHNRTNXMAELNSRGGXVKSETXTDIEGITRIKYEIPTLDRTGKPDGGFKEISSIKTVYNPKXFXDDKILQMAQXAXSQGYSKASKIAQNERTKSISERKNVIQFSETFDGIKFRXYXDVNTGRITNIHPE

SEQ ID NO: 483 - protein, 150 aa, Neisseria
  VARIANT (1)...(150): Xaa = Any Amino Acid
MAIITLYYSVNGILNVCAKAKNIQVVANNKNMVLFGFLXXIIGGSTNAMSPILLIFLLSETENKNRIVKSSNLCYLLAKIVQIYMLRDQYWLLNKSEYXLIFLLSVLSVIGLYVGIRLRTKISPNFFKMLIFIVLLVLALKIGHSGLIKL

SEQ ID NO: 484 - protein, 255 aa, Neisseria
MQEIMQSIVFVAAAILHGITGMGFPMLGTTALAFIMPLSKVVALVALPSLLMSLLVLCSNNKKGFWQEIVYYLKTYKLLAIGSVVGSILGVKLLLILPVSWLLLLMAIITLYYSVNGILNVCAKAKNIQVVANNKNMVLFGFLAGIIGGSTNAMSPILLIFLLSETENKNRIVKSSNLCYLLAKIVQIYMLRDQYWLLNKSEYGLIFLLSVLSVIGLYVGIRLRTKISPNFFKMLIFIVLLVLALKIGHSGLIKL

SEQ ID NO: 485 - protein, 255 aa, Neisseria
MQEIMQSIVFVAAAILHGITGMGFPMLGTTALAFIMPLSKVVALVALPSLLMSLLVLCSNNKKGFWQEIVYYLKTYKLLAIGSVVGSILGVKLLLILPVSWLLLLMAIITLYYSVNGILNVCAKAKNIQVVANNKNMVLFGFLAGIIGGSTNAMSPILLIFLLSETENKNRIAKSSNLCYLLAKIVQIYMLRDQYWLLNKSEYGLIFLLSVLSVIGLYVGIRLRTKISPNFFKMLIFIVLLVLALKIGYSGLIKL

SEQ ID NO: 486 - protein, 172 aa, Neisseria
MRHMKIQNYLLVFIVLHIALIVINIVFGYFVFLFDFFAFLFFANVFLAVNLLFLEKNIKNKLLFLLPISIIIWMVIHISMINIKFYKFEHQIKEQNISSITGVIKPHDSYNYVYDSNGYAKLKDNHRYGRVIRETPYIDVVASDVKNKSIRLSLVCGIHSYAPCANFIKFVR

SEQ ID NO: 487 - protein, 242 aa, Neisseria
MRHMKNKNYLLVFIVLHIALIVINIVFGYFVFLFDFFAFLFFANVFLAVNLLFLEKNIKNKLLFLLPISIIIWMVIHISMINIKFYKFEHQIKEQNISSITGVIKPHDSYNYVYDSNGYAKLKDNHRYGRVIRETPYIDVVASDVKNKSIRLSLVCGIHSYAPCANFIKFAKKPVKIYFYNQPQGDFIDNVIFEINDGNKSLYLLDKYKTFFLIENSVCIVLIILYLKFNLLLYRTYFNELE

SEQ ID NO: 488 - protein, 242 aa, Neisseria
MRHMKNKNYLLVFIVLHITLIVINIVFGYFVFLFDFFAFLFFANVFLAVNLLFLEKNIKNKLLFLLPISIIIWMVIHISMINIKFYKFEHQIKEQNISSITGVIKPHDSYNYVYDSNGYAKLKDNHRYGRVIRETPYIDVVASDVKNKSIRLSLVCGIHSYAPCANFIKFAKKPVKIYFYNQPQGDFIDNVIFEINDGKKSLYLLDKYKTFFLIENSVCIVLIILYLKFNLLLYRTYFNELE

SEQ ID NO: 489 - protein, 183 aa, Neisseria
TPNSVTVLPSFGGFGRTGATINAAGGVGMTAFSTTLISVAEGAVVELQAVRAKAVNATAACIFTVLSKDIFDFLFIFRFQTADFRLYFRQSHADSVRLDFIFKSFRACQFQFARIVLSRQQQGLRLVALHLVDDRLQLRKCRLVALMVRHSQARADKRDNGNRLPVIRQQFHEIHSRPPDASR

SEQ ID NO: 490 - protein, 155 aa, Neisseria
MTAFSTTLISVAEGAVVELQAVRAKAVNATAACIFTVLSKDIFDFLFIFRFQTADFRLFFRQSHADSVRLDFIFFSFRACQFQFARIVLSRQQQGLRLVALHLVDDRLLLRKCRLVALMVRHSQARADKRDNGNRLPVIRQQFHEIHSRPPDASR

SEQ ID NO: 491 - protein, 153 aa, Neisseria
MTAFSTTLISVAEGALVELQAVMAKAVNTTAACIFTVLSKDIFDFLFIFRFQTADFRLFFRQSHADGVRLDFIFFSFRTRLFQFAGVVLSRQQQGLRLVALHFLNDRLLLRKSRLVALMVRHRQTRADKRDDGNRLPVIRQQFHEIHSRPPDV

SEQ ID NO: 492 - protein, 608 aa, Neisseria
LGISRKISLILSILAVCLPMHAHASDLANDSFIRQVLDRQHFEPDGKYHLFGSRGELAERSGHIGLGKIQSHQLGNLMIQQAAIKGNIGYIVRFSDHGHEVHSPFDNHASHSDSDEAGSPVDGFSLYRIHWDGYEHHPADGYDGPQGGGYPAPKGARDIYSYDIKGVAQNIRLNLTDNRSTGQRLADRFHNAGSMLTQGVGDGFKRATRYSPELDRSGNAAEAFNGTADIVKNIIGAAGEIVGAGDAVQGISEGSNIAVMHGLGLLSTENKMARINDLADMAQLKDYAAAAIRDWAVQNPNAAQGIEAVSNIFMAAIPIKGIGAVRGKYGLGGITAHPIKRSQMGAIALPKGKSAVSDNFADAAYAKYPSPYHSRNIRSNLEQRYGKENITSSTVPPSNGKNVKLADQRHPKTGVPFDGKGFPNFEKHVKYDTKLDIQELSGGGIPKAKPVSDAKPRWEVDRKLNKLTTREQVEKNVQEIRNGNKNSNFSQHAQLEREINKLKSADEINFADGMGKFTDSMNDKAFSRLVKSVKENGFTNPVVEYVEINGKAYIVRGNNRVFAAEYLGRIHELKFKKVDFPVPNTSWKNPTDVLNESGNVKRPRYRSK

SEQ ID NO: 493 - protein, 464 aa, Neisseria
SPDVKSADTLSKPAAPVVSEKETEAKEDAPQAGSQGQGAPSAQGSQDMAAVSEENTGNGGAVTADNPKNEDEVAQNDMPQNAAGTDSSTPNHTPDPNMLAGNMENQATDAGESSQPANQPDMANAADGMQGDDPSAGGQNAGNTAAQGANQAGNNQAAGSSDPIPASNPAPANGGSNFGRVDLANGVLIDGPSQNITLTHCKGDSCSGNNFLDEEVQLKSEFEKLSDADKISNYKKDGKNDKFVGLVADSVQMKGINQYIIFYKPKPTSFARFRRSARSRRSLPAEMPLIPVNQADTLIVDGEAVSLTGHSGNIFAPEGNYRYLTYGAEKLPGGSYALRVQGEPAKGEMLAGAAVYNGEVLHFHTENGRPYPTRGRFAAKVDFGSKSVDGIIDSGDDLHMGTQKFKAAIDGNGFKGTWTENGSGDVSGKFYGPAGEEVAGKYSYRPTDAEKGGFGVFAGKKEQD

SEQ ID NO: 494 - protein, 832 aa, Neisseria
MASPDVKSADTLSKPAAPVVAEKETEVKEDAPQAGSQGQGAPSTQGSQDMAAVSAENTGNGGAATTDKPKNEDEGPQNDMPQNSAESANQTGNNQPADSSDSAPASNPAPANGGSNFGRVDLANGVLIDGPSQNITLTHCKGDSCNGDNLLDEEAPSKSEFENLNESERIEKYKKDGKSDKFTNLVATAVQANGTNKYVIIYKDKSASSSSARFRRSARSRRSLPAEMPLIPVNQADTLIVDGEAVSLTGHSGNIFAPEGNYRYLTYGAEKLPGGSYALRVQGEPAKGEMLAGTAVYNGEVLHFHTENGRPYPTRGRFAAKVDFGSKSVDGIIDSGDDLHMGTQKFKAAIDGNGFKGTWTENGGGDVSGRFYGPAGEEVAGKYSYRPTDAEKGGFGVFAGKKEQDGSGGGGCQSKSIQTFPQPDTSVINGPDRPVGIPDPAGTTVGGGGAVYTVVPHLSLPHWAAQDFAKSLQSFRLGCANLKNRQGWQDVCAQAFQTPVHSFQAKQFFERYFTPWQVAGNGSLAGTVTGYYEPVLKGDDRRTAQARFPIYGIPDDFISVPLPAGLRSGKALVRIRQTGKNSGTIDNTGGTHTADLSRFPITARTTAIKGRFEGSRFLPYHTRNQINGGALDGKAPILGYAEDPVELFFMHIQGSGRLKTPSGKYIRIGYADKNEHPYVSIGRYMADKGYLKLGQTSMQGIKAYMRQNPQRLAEVLGQNPSYIFFRELAGSSNDGPVGALGTPLMGEYAGAVDRHYITLGAPLFVATAHPVTRKALNRLIMAQDTGSAIKGAVRVDYFWGYGDEAGELAGKQKTTGYVWQLLPNGMKPEYRP

SEQ ID NO: 495 - protein, 579 aa, Neisseria
MASPDVKSADTLSKPAAPVVAEKETEVKEDAPQAGSQGQGAPSTQGSQDMAAVSAENTGNGGAATTDKPKNEDEGPQNDMPQNSAESANQTGNNQPADSSDSAPASNPAPANGGSNFGRVDLANGVLIDGPSQNITLTHCKGDSCNGDNLLDEEAPSKSEFENLNESERIEKYKKDGKSDKFTNLVATAVQANGTNKYVIIYKDKSASSSSARFRRSARSRRSLPAEMPLIPVNQADTLIVDGEAVSLTGHSGNIFAPEGNYRYLTYGAEKLPGGSYALRVQGEPAKGEMLAGTAVYNGEVLHFHTENGRPYPTRGRFAAKVDFGSKSVDGIIDSGDDLHMGTQKFKAAIDGNGFKGTWTENGGGDVSGRFYGPAGEEVAGKYSYRPTDAEKGGFGVFAGKKEQDGSGGGGATYKVDEYHANARFAIDHFNTSTNVGGFYGLTGSVEFDQAKRDGKIDITIPVANLQSGSQHFTDHLKSADIFDAAQYPDIRFVSTKFNFNGKKLVSVDGNLTMHGKTAPVKLKAEKFNCYQSPMAKTEVCGGDFSTTIDRTKWGVDYLVNVGMTKSVRIDIQIEAAKQ

SEQ ID NO: 496 - protein, 793 aa, Neisseria
MASPDVKSADTLSKPAAPVVAEKETEVKEDAPQAGSQGQGAPSTQGSQDMAAVSAENTGNGGAATTDKPKNEDEGPQNDMPQNSAESANQTGNNQPADSSDSAPASNPAPANGGSNFGRVDLANGVLIDGPSQNITLTHCKGDSCNGDNLLDEEAPSKSEFENLNESERIEKYKKDGKSDKFTNLVATAVQANGTNKYVIIYKDKSASSSSARFRRSARSRRSLPAEMPLIPVNQADTLIVDGEAVSLTGHSGNIFAPEGNYRYLTYGAEKLPGGSYALRVQGEPAKGEMLAGTAVYNGEVLHFHTENGRPYPTRGRFAAKVDFGSKSVDGIIDSGDDLHMGTQKFKAAIDGNGFKGTWTENGGGDVSGRFYGPAGEEVAGKYSYRPTDAEKGGFGVFAGKKEQDGSGGGGATNDDDVKKAATVAIAAAYNNGQEINGFKAGETIYDIDEDGTITKKDATAADVEADDFKGLGLKKVVTNLTKTVNENKQNVDAKVKAAESEIEKLTTKLADTDAALADTDAALDATTNALNKLGENITTFAEETKTNIVKIDEKLEAVADTVDKHAEAFNDIADSLDETNTKADEAVKTANEAKQTAEETKQNVDAKVKAAETAAGKAEAAAGTANTAADKAEAVAAKVTDIKADIATNKDNIAKKANSADVYTREESDSKFVRIDGLNATTEKLDTRLASAEKSIADHDTRLNGLDKTVSDLRKETRQGLAEQAALSGLFQPYNVGRFNVTAAVGGYKSESAVAIGTGFRFTENFAAKAGVAVGTSSGSSAAYHVGVNYEW

SEQ ID NO: 497 - protein, 897 aa, Neisseria
MASPDVKSADTLSKPAAPVVSEKETEAKEDAPQAGSQGQGAPSAQGGQDMAAVSEENTGNGGAAATDKPKNEDEGAQNDMPQNAADTDSLTPNHTPASNMPAGNMENQAPDAGESEQPANQPDMANTADGMQGDDPSAGGENAGNTAAQGTNQAENNQTAGSQNPASSTNPSATNSGGDFGRTNVGNSVVIDGPSQNITLTHCKGDSCSGNNFLDEEVQLKSEFEKLSDADKISNYKKDGKNDGKNDKFVGLVADSVQMKGINQYIIFYKPKPTSFARFRRSARSRRSLPAEMPLIPVNQADTLIVDGEAVSLTGHSGNIFAPEGNYRYLTYGAEKLPGGSYALRVQGEPSKGEMLAGTAVYNGEVLHFHTENGRPSPSRGRFAAKVDFGSKSVDGIIDSGDGLHMGTQKFKAAIDGNGFKGTWTENGGGDVSGKFYGPAGEEVAGKYSYRPTDAEKGGFGVFAGKKEQDGSGGGGCQSKSIQTFPQPDTSVINGPDRPVGIPDPAGTTVGGGGAVYTVVPHLSLPHWAAQDFAKSLQSFRLGCANLKNRQGWQDVCAQAFQTPVHSFQAKQFFERYFTPWQVAGNGSLAGTVTGYYEPVLKGDDRRTAQARFPIYGIPDDFISVPLPAGLRSGKALVRIRQTGKNSGTIDNTGGTHTADLSRFPITARTTAIKGRFEGSRFLPYHTRNQINGGALDGKAPILGYAEDPVELFFMHIQGSGRLKTPSGKYIRIGYADKNEHPYVSIGRYMADKGYLKLGQTSMQGIKAYMRQNPQRLAEVLGQNPSYIFFRELAGSSNDGPVGALGTPLMGEYAGAVDRHYITLGAPLFVATAHPVTRKALNRLIMAQDTGSAIKGAVRVDYFWGYGDEAGELAGKQKTTGYVWQLLPNGMKPEYRP

SEQ ID NO: 498 - protein, 644 aa, Neisseria
MASPDVKSADTLSKPAAPVVSEKETEAKEDAPQAGSQGQGAPSAQGGQDMAAVSEENTGNGGAAATDKPKNEDEGAQNDMPQNAADTDSLTPNHTPASNMPAGNMENQAPDAGESEQPANQPDMANTADGMQGDDPSAGGENAGNTAAQGTNQAENNQTAGSQNPASSTNPSATNSGGDFGRTNVGNSVVIDGPSQNITLTHCKGDSCSGNNFLDEEVQLKSEFEKLSDADKISNYKKDGKNDGKNDKFVGLVADSVQMKGINQYIIFYKPKPTSFARFRRSARSRRSLPAEMPLIPVNQADTLIVDGEAVSLTGHSGNIFAPEGNYRYLTYGAEKLPGGSYALRVQGEPSKGEMLAGTAVYNGEVLHFHTENGRPSPSRGRFAAKVDFGSKSVDGIIDSGDGLHMGTQKFKAAIDGNGFKGTWTENGGGDVSGKFYGPAGEEVAGKYSYRPTDAEKGGFGVFAGKKEQDGSGGGGATYKVDEYHANARFAIDHFNTSTNVGGFYGLTGSVEFDQAKRDGKIDITIPVANLQSGSQHFTDHLKSADIFDAAQYPDIRFVSTKFNFNGKKLVSVDGNLTMHGKTAPVKLKAEKFNCYQSPMAKTEVCGGDFSTTIDRTKWGVDYLVNVGMTKSVRIDIQIEAAKQ

SEQ ID NO: 499 - protein, 858 aa, Neisseria
MASPDVKSADTLSKPAAPVVSEKETEAKEDAPQAGSQGQGAPSAQGGQDMAAVSEENTGNGGAAATDKPKNEDEGAQNDMPQNAADTDSLTPNHTPASNMPAGNMENQAPDAGESEQPANQPDMANTADGMQGDDPSAGGENAGNTAAQGTNQAENNQTAGSQNPASSTNPSATNSGGDFGRTNVGNSVVIDGPSQNITLTHCKGDSCSGNNFLDEEVQLKSEFEKLSDADKISNYKKDGKNDGKNDKFVGLVADSVQMKGINQYIIFYKPKPTSFARFRRSARSRRSLPAEMPLIPVNQADTLIVDGEAVSLTGHSGNIFAPEGNYRYLTYGAEKLPGGSYALRVQGEPSKGEMLAGTAVYNGEVLHFHTENGRPSPSRGRFAAKVDFGSKSVDGIIDSGDGLHMGTQKFKAAIDGNGFKGTWTENGGGDVSGKFYGPAGEEVAGKYSYRPTDAEKGGFGVFAGKKEQDGSGGGGATNDDDVKKAATVAIAAAYNNGQEINGFKAGETIYDIDEDGTITKKDATAADVEADDFKGLGLKKVVTNLTKTVNENKQNVDAKVKAAESEIEKLTTKLADTDAALADTDAALDATTNALNKLGENITTFAEETKTNIVKIDEKLEAVADTVDKHAEAFNDIADSLDETNTKADEAVKTANEAKQTAEETKQNVDAKVKAAETAAGKAEAAAGTANTAADKAEAVAAKVTDIKADIATNKDNIAKKANSADVYTREESDSKFVRIDGLNATTEKLDTRLASAEKSIADHDTRLNGLDKTVSDLRKETRQGLAEQAALSGLFQPYNVGRFNVTAAVGGYKSESAVAIGTGFRFTENFAAKAGVAVGTSSGSSAAYHVGVNYEW

SEQ ID NO: 500 - protein, 1082 aa, Neisseria
MRTTPTFPTKTFKPTAMALAVATTLSACLGGGGGGTSAPDFNAGGTGIGSNSRATTAKSAAVSYAGIKNEMCKDRSMLCAGRDDVAVTDRDAKINAPPPNLHTGDFPNPNDAYKNLINLKPAIEAGYTGRGVEVGIVDTGESVGSISFPELYGRKEHGYNENYKNYTAYMRKEAPEDGGGKDIEASFDDEAVIETEAKPTDIRHVKEIGHIDLVSHIIGGRSVDGRPAGGIAPDATLHIMNTNDETKNEMMVAAIRNAWVKLGERGVRIVNNSFGTTSRAGTADLFQIANSEEQYRQALLDYSGGDKTDEGIRLMQQSDYGNLSYHIRNKNMLFIFSTGNDAQAQPNTYALLPFYEKDAQKGIITVAGVDRSGEKFKREMYGEPGTEPLEYGSNHCGITAMWCLSAPYEASVRFTRTNPIQIAGTSFSAPIVTGTAALLLQKYPWMSNDNLRTTLLTTAQDIGAVGVDSKFGWGLLDAGKAMNGPASFPFGDFTADTKGTSDIAYSFRNDISGTGGLIKKGGSQLQLHGNNTYTGKTIIEGGSLVLYGNNKSDMRVETKGALIYNGAASGGSLNSDGIVYLADTDQSGANETVHIKGSLQLDGKGTLYTRLGKLLKVDGTAIIGGKLYMSARGKGAGYLNSTGRRVPFLSAAKIGQDYSFFTNIETDGGLLASLDSVEKTAGSEGDTLSYYVRRGNAARTASAAAHSAPAGLKHAVEQGGSNLENLMVELDASESSATPETVETAAADRTDMPGIRPYGATFRAAAAVQHANAADGVRIFNSLAATVYADSTAAHADMQGRRLKAVSDGLDHNGTGLRVIAQTQQDGGTWEQGGVEGKMRGSTQTVGIAAKTGENTTAAATLGMGRSTWSENSANAKTDSISLFAGIRHDAGDIGYLKGLFSYGRYKNSISRSTGADEHAEGSVNGTLMQLGALGGVNVPFAATGDLTVEGGLRYDLLKQDAFAEKGSALGWSGNSLTEGTLVGLAGLKLSQPLSDKAVLFATAGVERDLNGRDYTVTGGFTGATAATGKTGARNMPHTRLVAGLGADVEFGNGWNGLARYSYAGSKQYGNHSGRVGVGYRF

SEQ ID NO: 501 - protein, 1047 aa, Neisseria
TSAPDFNAGGTGIGSNSRATTAKSAAVSYAGIKNEMCKDRSMLCAGRDDVAVTDRDAKINAPPPNLHTGDFPNPNDAYKNLINLKPAIEAGYTGRGVEVGIVDTGESVGSISFPELYGRKEHGYNENYKNYTAYMRKEAPEDGGGKDIEASFDDEAVIETEAKPTDIRHVKEIGHIDLVSHIIGGRSVDGRPAGGIAPDATLHIMNTNDETKNEMMVAAIRNAWVKLGERGVRIVNNSFGTTSRAGTADLFQIANSEEQYRQALLDYSGGDKTDEGIRLMQQSDYGNLSYHIRNKNMLFIFSTGNDAQAQPNTYALLPFYEKDAQKGIITVAGVDRSGEKFKREMYGEPGTEPLEYGSNHCGITAMWCLSAPYEASVRFTRTNPIQIAGTSFSAPIVTGTAALLLQKYPWMSNDNLRTTLLTTAQDIGAVGVDSKFGWGLLDAGKAMNGPASFPFGDFTADTKGTSDIAYSFRNDISGTGGLIKKGGSQLQLHGNNTYTGKTIIEGGSLVLYGNNKSDMRVETKGALIYNGAASGGSLNSDGIVYLADTDQSGANETVHIKGSLQLDGKGTLYTRLGKLLKVDGTAIIGGKLYMSARGKGAGYLNSTGRRVPFLSAAKIGQDYSFFTNIETDGGLLASLDSVEKTAGSEGDTLSYYVRRGNAARTASAAAHSAPAGLKHAVEQGGSNLENLMVELDASESSATPETVETAAADRTDMPGIRPYGATFRAAAAVQHANAADGVRIFNSLAATVYADSTAAHADMQGRRLKAVSDGLDHNGTGLRVIAQTQQDGGTWEQGGVEGKMRGSTQTVGIAAKTGENTTAAATLGMGRSTWSENSANAKTDSISLFAGIRHDAGDIGYLKGLFSYGRYKNSISRSTGADEHAEGSVNGTLMQLGALGGVNVPFAATGDLTVEGGLRYDLLKQDAFAEKGSALGWSGNSLTEGTLVGLAGLKLSQPLSDKAVLFATAGVERDLNGRDYTVTGGFTGATAATGKTGARNMPHTRLVAGLGADVEFGNGWNGLARYSYAGSKQYGNHSGRVGVGYRF

SEQ ID NO: 502 - protein, 1474 aa, Neisseria
MTSAPDFNAGGTGIGSNSRATTAKSAAVSYAGIKNEMCKDRSMLCAGRDDVAVTDRDAKINAPPPNLHTGDFPNPNDAYKNLINLKPAIEAGYTGRGVEVGIVDTGESVGSISFPELYGRKEHGYNENYKNYTAYMRKEAPEDGGGKDIEASFDDEAVIETEAKPTDIRHVKEIGHIDLVSHIIGGRSVDGRPAGGIAPDATLHIMNTNDETKNEMMVAAIRNAWVKLGERGVRIVNNSFGTTSRAGTADLFQIANSEEQYRQALLDYSGGDKTDEGIRLMQQSDYGNLSYHIRNKNMLFIFSTGNDAQAQPNTYALLPFYEKDAQKGIITVAGVDRSGEKFKREMYGEPGTEPLEYGSNHCGITAMWCLSAPYEASVRFTRTNPIQIAGTSFSAPIVTGTAALLLQKYPWMSNDNLRTTLLTTAQDIGAVGVDSKFGWGLLDAGKAMNGPASFPFGDFTADTKGTSDIAYSFRNDISGTGGLIKKGGSQLQLHGNNTYTGKTIIEGGSLVLYGNNKSDMRVETKGALIYNGAASGGSLNSDGIVYLADTDQSGANETVHIKGSLQLDGKGTLYTRLGKLLKVDGTAIIGGKLYMSARGKGAGYLNSTGRRVPFLSAAKIGQDYSFFTNIETDGGLLASLDSVEKTAGSEGDTLSYYVRRGNAARTASAAAHSAPAGLKHAVEQGGSNLENLMVELDASESSATPETVETAAADRTDMPGIRPYGATFRAAAAVQHANAADGVRIFNSLAATVYADSTAAHADMQGRRLKAVSDGLDHNGTGLRVIAQTQQDGGTWEQGGVEGKMRGSTQTVGIAAKTGENTTAAATLGMGRSTWSENSANAKTDSISLFAGIRHDAGDIGYLKGLFSYGRYKNSISRSTGADEHAEGSVNGTLMQLGALGGVNVPFAATGDLTVEGGLRYDLLKQDAFAEKGSALGWSGNSLTEGTLVGLAGLKLSQPLSDKAVLFATAGVERDLNGRDYTVTGGFTGATAATGKTGARNMPHTRLVAGLGADVEFGNGWNGLARYSYAGSKQYGNHSGRVGVGYRFLDGGGGTGSSDLANDSFIRQVLDRQHFEPDGKYHLFGSRGELAERSGHIGLGKIQSHQLGNLMIQQAAIKGNIGYIVRFSDHGHEVHSPFDNHASHSDSDEAGSPVDGFSLYRIHWDGYEHHPADGYDGPQGGGYPAPKGARDIYSYDIKGVAQNIRLNLTDNRSTGQRLADRFHNAGSMLTQGVGDGFKRATRYSPELDRSGNAAEAFNGTADIVKNIIGAAGEIVGAGDAVQGISEGSNIAVMHGLGLLSTENKMARINDLADMAQLKDYAAAAIRDWAVQNPNAAQGIEAVSNIFMAAIPIKGIGAVRGKYGLGGITAHPIKRSQMGAIALPKGKSAVSDNFADAAYAKYPSPYHSRNIRSNLEQRYGKENITSSTVPPSNGKNVKLADQRHPKTGVPFDGKGFPNFEKHVKYDTLEHHHHHH

SEQ ID NO: 503 - protein, 1312 aa, Neisseria
MTSAPDFNAGGTGIGSNSRATTAKSAAVSYAGIKNEMCKDRSMLCAGRDDVAVTDRDAKINAPPPNLHTGDFPNPNDAYKNLINLKPAIEAGYTGRGVEVGIVDTGESVGSISFPELYGRKEHGYNENYKNYTAYMRKEAPEDGGGKDIEASFDDEAVIETEAKPTDIRHVKEIGHIDLVSHIIGGRSVDGRPAGGIAPDATLHIMNTNDETKNEMMVAAIRNAWVKLGERGVRIVNNSFGTTSRAGTADLFQIANSEEQYRQALLDYSGGDKTDEGIRLMQQSDYGNLSYHIRNKNMLFIFSTGNDAQAQPNTYALLPFYEKDAQKGIITVAGVDRSGEKFKREMYGEPGTEPLEYGSNHCGITAMWCLSAPYEASVRFTRTNPIQIAGTSFSAPIVTGTAALLLQKYPWMSNDNLRTTLLTTAQDIGAVGVDSKFGWGLLDAGKAMNGPASFPFGDFTADTKGTSDIAYSFRNDISGTGGLIKKGGSQLQLHGNNTYTGKTIIEGGSLVLYGNNKSDMRVETKGALIYNGAASGGSLNSDGIVYLADTDQSGANETVHIKGSLQLDGKGTLYTRLGKLLKVDGTAIIGGKLYMSARGKGAGYLNSTGRRVPFLSAAKIGQDYSFFTNIETDGGLLASLDSVEKTAGSEGDTLSYYVRRGNAARTASAAAHSAPAGLKHAVEQGGSNLENLMVELDASESSATPETVETAAADRTDMPGIRPYGATFRAAAAVQHANAADGVRIFNSLAATVYADSTAAHADMQGRRLKAVSDGLDHNGTGLRVIAQTQQDGGTWEQGGVEGKMRGSTQTVGIAAKTGENTTAAATLGMGRSTWSENSANAKTDSISLFAGIRHDAGDIGYLKGLFSYGRYKNSISRSTGADEHAEGSVNGTLMQLGALGGVNVPFAATGDLTVEGGLRYDLLKQDAFAEKGSALGWSGNSLTEGTLVGLAGLKLSQPLSDKAVLFATAGVERDLNGRDYTVTGGFTGATAATGKTGARNMPHTRLVAGLGADVEFGNGWNGLARYSYAGSKQYGNHSGRVGVGYRFLEGSGGGGVAADIGAGLADALTAPLDHKDKGLQSLTLDQSVRKNEKLKLAAQGAEKTYGNGDSLNTGKLKNDKVSRFDFIRQIEVDGQLITLESGEFQVYKQSHSALTAFQTEQIQDSEHSGKMVAKRQFRIGDIAGEHTSFDKLPEGGRATYRGTAFGSDDAGGKLTYTIDFAAKQGNGKIEHLKSPELNVDLAAADIKPDGKRHAVISGSVLYNQAEKGSYSLGIFGGKAQEVAGSAEVKTVNGIRHIGLAAKQLEHHHHHH

SEQ ID NO: 504 - protein, 1447 aa, Neisseria
MTSAPDFNAGGTGIGSNSRATTAKSAAVSYAGIKNEMCKDRSMLCAGRDDVAVTDRDAKINAPPPNLHTGDFPNPNDAYKNLINLKPAIEAGYTGRGVEVGIVDTGESVGSISFPELYGRKEHGYNENYKNYTAYMRKEAPEDGGGKDIEASFDDEAVIETEAKPTDIRHVKEIGHIDLVSHIIGGRSVDGRPAGGIAPDATLHIMNTNDETKNEMMVAAIRNAWVKLGERGVRIVNNSFGTTSRAGTADLFQIANSEEQYRQALLDYSGGDKTDEGIRLMQQSDYGNLSYHIRNKNMLFIFSTGNDAQAQPNTYALLPFYEKDAQKGIITVAGVDRSGEKFKREMYGEPGTEPLEYGSNHCGITAMWCLSAPYEASVRFTRTNPIQIAGTSFSAPIVTGTAALLLQKYPWMSNDNLRTTLLTTAQDIGAVGVDSKFGWGLLDAGKAMNGPASFPFGDFTADTKGTSDIAYSFRNDISGTGGLIKKGGSQLQLHGNNTYTGKTIIEGGSLVLYGNNKSDMRVETKGALIYNGAASGGSLNSDGIVYLADTDQSGANETVHIKGSLQLDGKGTLYTRLGKLLKVDGTAIIGGKLYMSARGKGAGYLNSTGRRVPFLSAAKIGQDYSFFTNIETDGGLLASLDSVEKTAGSEGDTLSYYVRRGNAARTASAAAHSAPAGLKHAVEQGGSNLENLMVELDASESSATPETVETAAADRTDMPGIRPYGATFRAAAAVQHANAADGVRIFNSLAATVYADSTAAHADMQGRRLKAVSDGLDHNGTGLRVIAQTQQDGGTWEQGGVEGKMRGSTQTVGIAAKTGENTTAAATLGMGRSTWSENSANAKTDSISLFAGIRHDAGDIGYLKGLFSYGRYKNSISRSTGADEHAEGSVNGTLMQLGALGGVNVPFAATGDLTVEGGLRYDLLKQDAFAEKGSALGWSGNSLTEGTLVGLAGLKLSQPLSDKAVLFATAGVERDLNGRDYTVTGGFTGATAATGKTGARNMPHTRLVAGLGADVEFGNGWNGLARYSYAGSKQYGNHSGRVGVGYRFLEGGGGTGSATNDDDVKKAATVAIAAAYNNGQEINGFKAGETIYDIDEDGTITKKDATAADVEADDFKGLGLKKVVTNLTKTVNENKQNVDAKVKAAESEIEKLTTKLADTDAALADTDAALDATTNALNKLGENITTFAEETKTNIVKIDEKLEAVADTVDKHAEAFNDIADSLDETNTKADEAVKTANEAKQTAEETKQNVDAKVKAAETAAGKAEAAAGTANTAADKAEAVAAKVTDIKADIATNKDNIAKKANSADVYTREESDSKFVRIDGLNATTEKLDTRLASAEKSIADHDTRLNGLDKTVSDLRKETRQGLAEQAALSGLFQPYNVGRFNVTAAVGGYKSESAVAIGTGFRFTENFAAKAGVAVGTSSGSSAAYHVGVNYEWLEHHHHHH

SEQ ID NO: 505 - protein, 1392 aa, Neisseria
MTSAPDFNAGGTGIGSNSRATTAKSAAVSYAGIKNEMCKDRSMLCAGRDDVAVTDRDAKINAPPPNLHTGDFPNPNDAYKNLINLKPAIEAGYTGRGVEVGIVDTGESVGSISFPELYGRKEHGYNENYKNYTAYMRKEAPEDGGGKDIEASFDDEAVIETEAKPTDIRHVKEIGHIDLVSHIIGGRSVDGRPAGGIAPDATLHIMNTNDETKNEMMVAAIRNAWVKLGERGVRIVNNSFGTTSRAGTADLFQIANSEEQYRQALLDYSGGDKTDEGIRLMQQSDYGNLSYHIRNKNMLFIFSTGNDAQAQPNTYALLPFYEKDAQKGIITVAGVDRSGEKFKREMYGEPGTEPLEYGSNHCGITAMWCLSAPYEASVRFTRTNPIQIAGTSFSAPIVTGTAALLLQKYPWMSNDNLRTTLLTTAQDIGAVGVDSKFGWGLLDAGKAMNGPASFPFGDFTADTKGTSDIAYSFRNDISGTGGLIKKGGSQLQLHGNNTYTGKTIIEGGSLVLYGNNKSDMRVETKGALIYNGAASGGSLNSDGIVYLADTDQSGANETVHIKGSLQLDGKGTLYTRLGKLLKVDGTAIIGGKLYMSARGKGAGYLNSTGRRVPFLSAAKIGQDYSFFTNIETDGGLLASLDSVEKTAGSEGDTLSYYVRRGNAARTASAAAHSAPAGLKHAVEQGGSNLENLMVELDASESSATPETVETAAADRTDMPGIRPYGATFRAAAAVQHANAADGVRIFNSLAATVYADSTAAHADMQGRRLKAVSDGLDHNGTGLRVIAQTQQDGGTWEQGGVEGKMRGSTQTVGIAAKTGENTTAAATLGMGRSTWSENSANAKTDSISLFAGIRHDAGDIGYLKGLFSYGRYKNSISRSTGADEHAEGSVNGTLMQLGALGGVNVPFAATGDLTVEGGLRYDLLKQDAFAEKGSALGWSGNSLTEGTLVGLAGLKLSQPLSDKAVLFATAGVERDLNGRDYTVTGGFTGATAATGKTGARNMPHTRLVAGLGADVEFGNGWNGLARYSYAGSKQYGNHSGRVGVGYRFLEGGGGTGSATNDDDVKKAATVAIAAAYNNGQEINGFKAGETIYDIDEDGTITKKDATAADVEADDFKGLGLKKVVTNLTKTVNENKQNVDAKVKAAESEIEKLTTKLADTDAALADTDAALDATTNALNKLGENITTFAEETKTNIVKIDEKLEAVADTVDKHAEAFNDIADSLDETNTKADEAVKTANEAKQTAEETKQNVDAKVKAAETAAGKAEAAAGTANTAADKAEAVAAKVTDIKADIATNKDNIAKKANSADVYTREESDSKFVRIDGLNATTEKLDTRLASAEKSIADHDTRLNGLDKTVSDLRKETRQGLAEQAALSGLFQPYNVGLEHHHHHH

SEQ ID NO: 506 - protein, 274 aa, Neisseria
VNRTAFCCLSLTTALILTACSSGGGGVAADIGAGLADALTAPLDHKDKGLQSLTLDQSVRKNEKLKLAAQGAEKTYGNGDSLNTGKLKNDKVSRFDFIRQIEVDGQLITLESGEFQVYKQSHSALTAFQTEQIQDSEHSGKMVAKRQFRIGDIAGEHTSFDKLPEGGRATYRGTAFGSDDAGGKLTYTIDFAAKQGNGKIEHLKSPELNVDLAAADIKPDGKRHAVISGSVLYNQAEKGSYSLGIFGGKAQEVAGSAEVKTVNGIRHIGLAAKQ

SEQ ID NO: 507 - protein, 248 aa, Neisseria
VAADIGAGLADALTAPLDHKDKGLQSLTLDQSVRKNEKLKLAAQGAEKTYGNGDSLNTGKLKNDKVSRFDFIRQIEVDGQLITLESGEFQVYKQSHSALTAFQTEQIQDSEHSGKMVAKRQFRIGDIAGEHTSFDKLPEGGRATYRGTAFGSDDAGGKLTYTIDFAAKQGNGKIEHLKSPELNVDLAAADIKPDGKRHAVISGSVLYNQAEKGSYSLGIFGGKAQEVAGSAEVKTVNGIRHIGLAAKQ

SEQ ID NO: 508 - protein, 648 aa, Neisseria
MVAADIGAGLADALTAPLDHKDKGLQSLTLDQSVRKNEKLKLAAQGAEKTYGNGDSLNTGKLKNDKVSRFDFIRQIEVDGQLITLESGEFQVYKQSHSALTAFQTEQIQDSEHSGKMVAKRQFRIGDIAGEHTSFDKLPEGGRATYRGTAFGSDDAGGKLTYTIDFAAKQGNGKIEHLKSPELNVDLAAADIKPDGKRHAVISGSVLYNQAEKGSYSLGIFGGKAQEVAGSAEVKTVNGIRHIGLAAKQLEGGGGTGSATNDDDVKKAATVAIAAAYNNGQEINGFKAGETIYDIDEDGTITKKDATAADVEADDFKGLGLKKVVTNLTKTVNENKQNVDAKVKAAESEIEKLTTKLADTDAALADTDAALDATTNALNKLGENITTFAEETKTNIVKIDEKLEAVADTVDKHAEAFNDIADSLDETNTKADEAVKTANEAKQTAEETKQNVDAKVKAAETAAGKAEAAAGTANTAADKAEAVAAKVTDIKADIATNKDNIAKKANSADVYTREESDSKFVRIDGLNATTEKLDTRLASAEKSIADHDTRLNGLDKTVSDLRKETRQGLAEQAALSGLFQPYNVGRFNVTAAVGGYKSESAVAIGTGFRFTENFAAKAGVAVGTSSGSSAAYHVGVNYEWLEHHHHHH

SEQ ID NO: 509 - protein, 593 aa, Neisseria
MVAADIGAGLADALTAPLDHKDKGLQSLTLDQSVRKNEKLKLAAQGAEKTYGNGDSLNTGKLKNDKVSRFDFIRQIEVDGQLITLESGEFQVYKQSHSALTAFQTEQIQDSEHSGKMVAKRQFRIGDIAGEHTSFDKLPEGGRATYRGTAFGSDDAGGKLTYTIDFAAKQGNGKIEHLKSPELNVDLAAADIKPDGKRHAVISGSVLYNQAEKGSYSLGIFGGKAQEVAGSAEVKTVNGIRHIGLAAKQLEGGGGTGSATNDDDVKKAATVAIAAAYNNGQEINGFKAGETIYDIDEDGTITKKDATAADVEADDFKGLGLKKVVTNLTKTVNENKQNVDAKVKAAESEIEKLTTKLADTDAALADTDAALDATTNALNKLGENITTFAEETKTNIVKIDEKLEAVADTVDKHAEAFNDIADSLDETNTKADEAVKTANEAKQTAEETKQNVDAKVKAAETAAGKAEAAAGTANTAADKAEAVAAKVTDIKADIATNKDNIAKKANSADVYTREESDSKFVRIDGLNATTEKLDTRLASAEKSIADHDTRLNGLDKTVSDLRKETRQGLAEQAALSGLFQPYNVGLEHHHHHH

SEQ ID NO: 510 - protein, 1312 aa, Neisseria
MVAADIGAGLADALTAPLDHKDKGLQSLTLDQSVRKNEKLKLAAQGAEKTYGNGDSLNTGKLKNDKVSRFDFIRQIEVDGQLITLESGEFQVYKQSHSALTAFQTEQIQDSEHSGKMVAKRQFRIGDIAGEHTSFDKLPEGGRATYRGTAFGSDDAGGKLTYTIDFAAKQGNGKIEHLKSPELNVDLAAADIKPDGKRHAVISGSVLYNQAEKGSYSLGIFGGKAQEVAGSAEVKTVNGIRHIGLAAKQLEGSGGGGTSAPDFNAGGTGIGSNSRATTAKSAAVSYAGIKNEMCKDRSMLCAGRDDVAVTDRDAKINAPPPNLHTGDFPNPNDAYKNLINLKPAIEAGYTGRGVEVGIVDTGESVGSISFPELYGRKEHGYNENYKNYTAYMRKEAPEDGGGKDIEASFDDEAVIETEAKPTDIRHVKEIGHIDLVSHIIGGRSVDGRPAGGIAPDATLHIMNTNDETKNEMMVAAIRNAWVKLGERGVRIVNNSFGTTSRAGTADLFQIANSEEQYRQALLDYSGGDKTDEGIRLMQQSDYGNLSYHIRNKNMLFIFSTGNDAQAQPNTYALLPFYEKDAQKGIITVAGVDRSGEKFKREMYGEPGTEPLEYGSNHCGITAMWCLSAPYEASVRFTRTNPIQIAGTSFSAPIVTGTAALLLQKYPWMSNDNLRTTLLTTAQDIGAVGVDSKFGWGLLDAGKAMNGPASFPFGDFTADTKGTSDIAYSFRNDISGTGGLIKKGGSQLQLHGNNTYTGKTIIEGGSLVLYGNNKSDMRVETKGALIYNGAASGGSLNSDGIVYLADTDQSGANETVHIKGSLQLDGKGTLYTRLGKLLKVDGTAIIGGKLYMSARGKGAGYLNSTGRRVPFLSAAKIGQDYSFFTNIETDGGLLASLDSVEKTAGSEGDTLSYYVRRGNAARTASAAAHSAPAGLKHAVEQGGSNLENLMVELDASESSATPETVETAAADRTDMPGIRPYGATFRAAAAVQHANAADGVRIFNSLAATVYADSTAAHADMQGRRLKAVSDGLDHNGTGLRVIAQTQQDGGTWEQGGVEGKMRGSTQTVGIAAKTGENTTAAATLGMGRSTWSENSANAKTDSISLFAGIRHDAGDIGYLKGLFSYGRYKNSISRSTGADEHAEGSVNGTLMQLGALGGVNVPFAATGDLTVEGGLRYDLLKQDAFAEKGSALGWSGNSLTEGTLVGLAGLKLSQPLSDKAVLFATAGVERDLNGRDYTVTGGFTGATAATGKTGARNMPHTRLVAGLGADVEFGNGWNGLARYSYAGSKQYGNHSGRVGVGYRFLEHHHHHH

SEQ ID NO: 511 - protein, 675 aa, Neisseria
MVAADIGAGLADALTAPLDHKDKGLQSLTLDQSVRKNEKLKLAAQGAEKTYGNGDSLNTGKLKNDKVSRFDFIRQIEVDGQLITLESGEFQVYKQSHSALTAFQTEQIQDSEHSGKMVAKRQFRIGDIAGEHTSFDKLPEGGRATYRGTAFGSDDAGGKLTYTIDFAAKQGNGKIEHLKSPELNVDLAAADIKPDGKRHAVISGSVLYNQAEKGSYSLGIFGGKAQEVAGSAEVKTVNGIRHIGLAAKQLDGGGGTGSSDLANDSFIRQVLDRQHFEPDGKYHLFGSRGELAERSGHIGLGKIQSHQLGNLMIQQAAIKGNIGYIVRFSDHGHEVHSPFDNHASHSDSDEAGSPVDGFSLYRIHWDGYEHHPADGYDGPQGGGYPAPKGARDIYSYDIKGVAQNIRLNLTDNRSTGQRLADRFHNAGSMLTQGVGDGFKRATRYSPELDRSGNAAEAFNGTADIVKNIIGAAGEIVGAGDAVQGISEGSNIAVMHGLGLLSTENKMARINDLADMAQLKDYAAAAIRDWAVQNPNAAQGIEAVSNIFMAAIPIKGIGAVRGKYGLGGITAHPIKRSQMGAIALPKGKSAVSDNFADAAYAKYPSPYHSRNIRSNLEQRYGKENITSSTVPPSNGKNVKLADQRHPKTGVPFDGKGFPNFEKHVKYDTLEHHHHHH

SEQ ID NO: 512 - protein, 672 aa, Neisseria
MSDLANDSFIRQVLDRQHFEPDGKYHLFGSRGELAERSGHIGLGKIQSHQLGNLMIQQAAIKGNIGYIVRFSDHGHEVHSPFDNHASHSDSDEAGSPVDGFSLYRIHWDGYEHHPADGYDGPQGGGYPAPKGARDIYSYDIKGVAQNIRLNLTDNRSTGQRLADRFHNAGSMLTQGVGDGFKRATRYSPELDRSGNAAEAFNGTADIVKNIIGAAGEIVGAGDAVQGISEGSNIAVMHGLGLLSTENKMARINDLADMAQLKDYAAAAIRDWAVQNPNAAQGIEAVSNIFMAAIPIKGIGAVRGKYGLGGITAHPIKRSQMGAIALPKGKSAVSDNFADAAYAKYPSPYHSRNIRSNLEQRYGKENITSSTVPPSNGKNVKLADQRHPKTGVPFDGKGFPNFEKHVKYDTGSGGGGVAADIGAGLADALTAPLDHKDKGLQSLTLDQSVRKNEKLKLAAQGAEKTYGNGDSLNTGKLKNDKVSRFDFIRQIEVDGQLITLESGEFQVYKQSHSALTAFQTEQIQDSEHSGKMVAKRQFRIGDIAGEHTSFDKLPEGGRATYRGTAFGSDDAGGKLTYTIDFAAKQGNGKIEHLKSPELNVDLAAADIKPDGKRHAVISGSVLYNQAEKGSYSLGIFGGKAQEVAGSAEVKTVNGIRHIGLAAKQLEHHHHHH

SEQ ID NO: 513 - protein, 806 aa, Neisseria
MSDLANDSFIRQVLDRQHFEPDGKYHLFGSRGELAERSGHIGLGKIQSHQLGNLMIQQAAIKGNIGYIVRFSDHGHEVHSPFDNHASHSDSDEAGSPVDGFSLYRIHWDGYEHHPADGYDGPQGGGYPAPKGARDIYSYDIKGVAQNIRLNLTDNRSTGQRLADRFHNAGSMLTQGVGDGFKRATRYSPELDRSGNAAEAFNGTADIVKNIIGAAGEIVGAGDAVQGISEGSNIAVMHGLGLLSTENKMARINDLADMAQLKDYAAAAIRDWAVQNPNAAQGIEAVSNIFMAAIPIKGIGAVRGKYGLGGITAHPIKRSQMGAIALPKGKSAVSDNFADAAYAKYPSPYHSRNIRSNLEQRYGKENITSSTVPPSNGKNVKLADQRHPKTGVPFDGKGFPNFEKHVKYDTGSGGGGATNDDDVKKAATVAIAAAYNNGQEINGFKAGETIYDIDEDGTITKKDATAADVEADDFKGLGLKKVVTNLTKTVNENKQNVDAKVKAAESEIEKLTTKLADTDAALADTDAALDATTNALNKLGENITTFAEETKTNIVKIDEKLEAVADTVDKHAEAFNDIADSLDETNTKADEAVKTANEAKQTAEETKQNVDAKVKAAETAAGKAEAAAGTANTAADKAEAVAAKVTDIKADIATNKDNIAKKANSADVYTREESDSKFVRIDGLNATTEKLDTRLASAEKSIADHDTRLNGLDKTVSDLRKETRQGLAEQAALSGLFQPYNVGRFNVTAAVGGYKSESAVAIGTGFRFTENFAAKAGVAVGTSSGSSAAYHVGVNYEWLEHHHHHH

SEQ ID NO: 514 - protein, 751 aa, Neisseria
MSDLANDSFIRQVLDRQHFEPDGKYHLFGSRGELAERSGHIGLGKIQSHQLGNLMIQQAAIKGNIGYIVRFSDHGHEVHSPFDNHASHSDSDEAGSPVDGFSLYRIHWDGYEHHPADGYDGPQGGGYPAPKGARDIYSYDIKGVAQNIRLNLTDNRSTGQRLADRFHNAGSMLTQGVGDGFKRATRYSPELDRSGNAAEAFNGTADIVKNIIGAAGEIVGAGDAVQGISEGSNIAVMHGLGLLSTENKMARINDLADMAQLKDYAAAAIRDWAVQNPNAAQGIEAVSNIFMAAIPIKGIGAVRGKYGLGGITAHPIKRSQMGAIALPKGKSAVSDNFADAAYAKYPSPYHSRNIRSNLEQRYGKENITSSTVPPSNGKNVKLADQRHPKTGVPFDGKGFPNFEKHVKYDTGSGGGGATNDDDVKKAATVAIAAAYNNGQEINGFKAGETIYDIDEDGTITKKDATAADVEADDFKGLGLKKVVTNLTKTVNENKQNVDAKVKAAESEIEKLTTKLADTDAALADTDAALDATTNALNKLGENITTFAEETKTNIVKIDEKLEAVADTVDKHAEAFNDIADSLDETNTKADEAVKTANEAKQTAEETKQNVDAKVKAAETAAGKAEAAAGTANTAADKAEAVAAKVTDIKADIATNKDNIAKKANSADVYTREESDSKFVRIDGLNATTEKLDTRLASAEKSIADHDTRLNGLDKTVSDLRKETRQGLAEQAALSGLFQPYNVGLEHHHHHH

SEQ ID NO: 515 - protein, 806 aa, Neisseria
MATNDDDVKKAATVAIAAAYNNGQEINGFKAGETIYDIDEDGTITKKDATAADVEADDFKGLGLKKVVTNLTKTVNENKQNVDAKVKAAESEIEKLTTKLADTDAALADTDAALDATTNALNKLGENITTFAEETKTNIVKIDEKLEAVADTVDKHAEAFNDIADSLDETNTKADEAVKTANEAKQTAEETKQNVDAKVKAAETAAGKAEAAAGTANTAADKAEAVAAKVTDIKADIATNKDNIAKKANSADVYTREESDSKFVRIDGLNATTEKLDTRLASAEKSIADHDTRLNGLDKTVSDLRKETRQGLAEQAALSGLFQPYNVGRFNVTAAVGGYKSESAVAIGTGFRFTENFAAKAGVAVGTSSGSSAAYHVGVNYEWGSGGGGSDLANDSFIRQVLDRQHFEPDGKYHLFGSRGELAERSGHIGLGKIQSHQLGNLMIQQAAIKGNIGYIVRFSDHGHEVHSPFDNHASHSDSDEAGSPVDGFSLYRIHWDGYEHHPADGYDGPQGGGYPAPKGARDIYSYDIKGVAQNIRLNLTDNRSTGQRLADRFHNAGSMLTQGVGDGFKRATRYSPELDRSGNAAEAFNGTADIVKNIIGAAGEIVGAGDAVQGISEGSNIAVMHGLGLLSTENKMARINDLADMAQLKDYAAAAIRDWAVQNPNAAQGIEAVSNIFMAAIPIKGIGAVRGKYGLGGITAHPIKRSQMGAIALPKGKSAVSDNFADAAYAKYPSPYHSRNIRSNLEQRYGKENITSSTVPPSNGKNVKLADQRHPKTGVPFDGKGFPNFEKHVKYDTLEHHHHHH

SEQ ID NO: 516 - protein, 645 aa, Neisseria
MATNDDDVKKAATVAIAAAYNNGQEINGFKAGETIYDIDEDGTITKKDATAADVEADDFKGLGLKKVVTNLTKTVNENKQNVDAKVKAAESEIEKLTTKLADTDAALADTDAALDATTNALNKLGENITTFAEETKTNIVKIDEKLEAVADTVDKHAEAFNDIADSLDETNTKADEAVKTANEAKQTAEETKQNVDAKVKAAETAAGKAEAAAGTANTAADKAEAVAAKVTDIKADIATNKDNIAKKANSADVYTREESDSKFVRIDGLNATTEKLDTRLASAEKSIADHDTRLNGLDKTVSDLRKETRQGLAEQAALSGLFQPYNVGRFNVTAAVGGYKSESAVAIGTGFRFTENFAAKAGVAVGTSSGSSAAYHVGVNYEWGSGGGGVAADIGAGLADALTAPLDHKDKGLQSLTLDQSVRKNEKLKLAAQGAEKTYGNGDSLNTGKLKNDKVSRFDFIRQIEVDGQLITLESGEFQVYKQSHSALTAFQTEQIQDSEHSGKMVAKRQFRIGDIAGEHTSFDKLPEGGRATYRGTAFGSDDAGGKLTYTIDFAAKQGNGKIEHLKSPELNVDLAAADIKPDGKRHAVISGSVLYNQAEKGSYSLGIFGGKAQEVAGSAEVKTVNGIRHIGLAAKQLEHHHHHH

SEQ ID NO: 517 - protein, 1444 aa, Neisseria
MATNDDDVKKAATVAIAAAYNNGQEINGFKAGETIYDIDEDGTITKKDATAADVEADDFKGLGLKKVVTNLTKTVNENKQNVDAKVKAAESEIEKLTTKLADTDAALADTDAALDATTNALNKLGENITTFAEETKTNIVKIDEKLEAVADTVDKHAEAFNDIADSLDETNTKADEAVKTANEAKQTAEETKQNVDAKVKAAETAAGKAEAAAGTANTAADKAEAVAAKVTDIKADIATNKDNIAKKANSADVYTREESDSKFVRIDGLNATTEKLDTRLASAEKSIADHDTRLNGLDKTVSDLRKETRQGLAEQAALSGLFQPYNVGRFNVTAAVGGYKSESAVAIGTGFRFTENFAAKAGVAVGTSSGSSAAYHVGVNYEWGSGGGGTSAPDFNAGGTGIGSNSRATTAKSAAVSYAGIKNEMCKDRSMLCAGRDDVAVTDRDAKINAPPPNLHTGDFPNPNDAYKNLINLKPAIEAGYTGRGVEVGIVDTGESVGSISFPELYGRKEHGYNENYKNYTAYMRKEAPEDGGGKDIEASFDDEAVIETEAKPTDIRHVKEIGHIDLVSHIIGGRSVDGRPAGGIAPDATLHIMNTNDETKNEMMVAAIRNAWVKLGERGVRIVNNSFGTTSRAGTADLFQIANSEEQYRQALLDYSGGDKTDEGIRLMQQSDYGNLSYHIRNKNMLFIFSTGNDAQAQPNTYALLPFYEKDAQKGIITVAGVDRSGEKFKREMYGEPGTEPLEYGSNHCGITAMWCLSAPYEASVRFTRTNPIQIAGTSFSAPIVTGTAALLLQKYPWMSNDNLRTTLLTTAQDIGAVGVDSKFGWGLLDAGKAMNGPASFPFGDFTADTKGTSDIAYSFRNDISGTGGLIKKGGSQLQLHGNNTYTGKTIIEGGSLVLYGNNKSDMRVETKGALIYNGAASGGSLNSDGIVYLADTDQSGANETVHIKGSLQLDGKGTLYTRLGKLLKVDGTAIIGGKLYMSARGKGAGYLNSTGRRVPFLSAAKIGQDYSFFTNIETDGGLLASLDSVEKTAGSEGDTLSYYVRRGNAARTASAAAHSAPAGLKHAVEQGGSNLENLMVELDASESSATPETVETAAADRTDMPGIRPYGATFRAAAAVQHANAADGVRIFNSLAATVYADSTAAHADMQGRRLKAVSDGLDHNGTGLRVIAQTQQDGGTWEQGGVEGKMRGSTQTVGIAAKTGENTTAAATLGMGRSTWSENSANAKTDSISLFAGIRHDAGDIGYLKGLFSYGRYKNSISRSTGADEHAEGSVNGTLMQLGALGGVNVPFAATGDLTVEGGLRYDLLKQDAFAEKGSALGWSGNSLTEGTLVGLAGLKLSQPLSDKAVLFATAGVERDLNGRDYTVTGGFTGATAATGKTGARNMPHTRLVAGLGADVEFGNGWNGLARYSYAGSKQYGNHSGRVGVGYRFLEHHHHHH

SEQ ID NO: 518 - protein, 751 aa, Neisseria
MATNDDDVKKAATVAIAAAYNNGQEINGFKAGETIYDIDEDGTITKKDATAADVEADDFKGLGLKKVVTNLTKTVNENKQNVDAKVKAAESEIEKLTTKLADTDAALADTDAALDATTNALNKLGENITTFAEETKTNIVKIDEKLEAVADTVDKHAEAFNDIADSLDETNTKADEAVKTANEAKQTAEETKQNVDAKVKAAETAAGKAEAAAGTANTAADKAEAVAAKVTDIKADIATNKDNIAKKANSADVYTREESDSKFVRIDGLNATTEKLDTRLASAEKSIADHDTRLNGLDKTVSDLRKETRQGLAEQAALSGLFQPYNVGGSGGGGSDLANDSFIRQVLDRQHFEPDGKYHLFGSRGELAERSGHIGLGKIQSHQLGNLMIQQAAIKGNIGYIVRFSDHGHEVHSPFDNHASHSDSDEAGSPVDGFSLYRIHWDGYEHHPADGYDGPQGGGYPAPKGARDIYSYDIKGVAQNIRLNLTDNRSTGQRLADRFHNAGSMLTQGVGDGFKRATRYSPELDRSGNAAEAFNGTADIVKNIIGAAGEIVGAGDAVQGISEGSNIAVMHGLGLLSTENKMARINDLADMAQLKDYAAAAIRDWAVQNPNAAQGIEAVSNIFMAAIPIKGIGAVRGKYGLGGITAHPIKRSQMGAIALPKGKSAVSDNFADAAYAKYPSPYHSRNIRSNLEQRYGKENITSSTVPPSNGKNVKLADQRHPKTGVPFDGKGFPNFEKHVKYDTLEHHHHHH

SEQ ID NO: 519 - protein, 590 aa, Neisseria
MATNDDDVKKAATVAIAAAYNNGQEINGFKAGETIYDIDEDGTITKKDATAADVEADDFKGLGLKKVVTNLTKTVNENKQNVDAKVKAAESEIEKLTTKLADTDAALADTDAALDATTNALNKLGENITTFAEETKTNIVKIDEKLEAVADTVDKHAEAFNDIADSLDETNTKADEAVKTANEAKQTAEETKQNVDAKVKAAETAAGKAEAAAGTANTAADKAEAVAAKVTDIKADIATNKDNIAKKANSADVYTREESDSKFVRIDGLNATTEKLDTRLASAEKSIADHDTRLNGLDKTVSDLRKETRQGLAEQAALSGLFQPYNVGGSGGGGVAADIGAGLADALTAPLDHKDKGLQSLTLDQSVRKNEKLKLAAQGAEKTYGNGDSLNTGKLKNDKVSRFDFIRQIEVDGQLITLESGEFQVYKQSHSALTAFQTEQIQDSEHSGKMVAKRQFRIGDIAGEHTSFDKLPEGGRATYRGTAFGSDDAGGKLTYTIDFAAKQGNGKIEHLKSPELNVDLAAADIKPDGKRHAVISGSVLYNQAEKGSYSLGIFGGKAQEVAGSAEVKTVNGIRHIGLAAKQLEHHHHHH

SEQ ID NO: 520 - protein, 1389 aa, Neisseria
MATNDDDVKKAATVAIAAAYNNGQEINGFKAGETIYDIDEDGTITKKDATAADVEADDFKGLGLKKVVTNLTKTVNENKQNVDAKVKAAESEIEKLTTKLADTDAALADTDAALDATTNALNKLGENITTFAEETKTNIVKIDEKLEAVADTVDKHAEAFNDIADSLDETNTKADEAVKTANEAKQTAEETKQNVDAKVKAAETAAGKAEAAAGTANTAADKAEAVAAKVTDIKADIATNKDNIAKKANSADVYTREESDSKFVRIDGLNATTEKLDTRLASAEKSIADHDTRLNGLDKTVSDLRKETRQGLAEQAALSGLFQPYNVGGSGGGGTSAPDFNAGGTGIGSNSRATTAKSAAVSYAGIKNEMCKDRSMLCAGRDDVAVTDRDAKINAPPPNLHTGDFPNPNDAYKNLINLKPAIEAGYTGRGVEVGIVDTGESVGSISFPELYGRKEHGYNENYKNYTAYMRKEAPEDGGGKDIEASFDDEAVIETEAKPTDIRHVKEIGHIDLVSHIIGGRSVDGRPAGGIAPDATLHIMNTNDETKNEMMVAAIRNAWVKLGERGVRIVNNSFGTTSRAGTADLFQIANSEEQYRQALLDYSGGDKTDEGIRLMQQSDYGNLSYHIRNKNMLFIFSTGNDAQAQPNTYALLPFYEKDAQKGIITVAGVDRSGEKFKREMYGEPGTEPLEYGSNHCGITAMWCLSAPYEASVRFTRTNPIQIAGTSFSAPIVTGTAALLLQKYPWMSNDNLRTTLLTTAQDIGAVGVDSKFGWGLLDAGKAMNGPASFPFGDFTADTKGTSDIAYSFRNDISGTGGLIKKGGSQLQLHGNNTYTGKTIIEGGSLVLYGNNKSDMRVETKGALIYNGAASGGSLNSDGIVYLADTDQSGANETVHIKGSLQLDGKGTLYTRLGKLLKVDGTAIIGGKLYMSARGKGAGYLNSTGRRVPFLSAAKIGQDYSFFTNIETDGGLLASLDSVEKTAGSEGDTLSYYVRRGNAARTASAAAHSAPAGLKHAVEQGGSNLENLMVELDASESSATPETVETAAADRTDMPGIRPYGATFRAAAAVQHANAADGVRIFNSLAATVYADSTAAHADMQGRRLKAVSDGLDHNGTGLRVIAQTQQDGGTWEQGGVEGKMRGSTQTVGIAAKTGENTTAAATLGMGRSTWSENSANAKTDSISLFAGIRHDAGDIGYLKGLFSYGRYKNSISRSTGADEHAEGSVNGTLMQLGALGGVNVPFAATGDLTVEGGLRYDLLKQDAFAEKGSALGWSGNSLTEGTLVGLAGLKLSQPLSDKAVLFATAGVERDLNGRDYTVTGGFTGATAATGKTGARNMPHTRLVAGLGADVEFGNGWNGLARYSYAGSKQYGNHSGRVGVGYRFLEHHHHHH

SEQ ID NO: 521 - protein, 765 aa, Neisseria
MKHFPSKVLTTAILATFCSGALAATNDDDVKKAATVAIAAAYNNGQEINGFKAGETIYDIDEDGTITKKDATAADVEADDFKGLGLKKVVTNLTKTVNENKQNVDAKVKAAESEIEKLTTKLADTDAALADTDAALDATTNALNKLGENITTFAEETKTNIVKIDEKLEAVADTVDKHAEAFNDIADSLDETNTKADEAVKTANEAKQTAEETKQNVDAKVKAAETAAGKAEAAAGTANTAADKAEAVAAKVTDIKADIATNKDNIAKKANSADVYTREESDSKFVRIDGLNATTEKLDTRLASAEKSIADHDTRLNGLDKTVSDLRKETRQGLAEQAALSGLFQPYNVGGSGGGGSDLANDSFIRQVLDRQHFEPDGKYHLFGSRGELAERSGHIGLGKIQSHQLGNLMIQQAAIKGNIGYIVRFSDHGHEVHSPFDNHASHSDSDEAGSPVDGFSLYRIHWDGYEHHPADGYDGPQGGGYPAPKGARDIYSYDIKGVAQNIRLNLTDNRSTGQRLADRFHNAGSMLTQGVGDGFKRATRYSPELDRSGNAAEAFNGTADIVKNIIGAAGEIVGAGDAVQGISEGSNIAVMHGLGLLSTENKMARINDLADMAQLKDYAAAAIRDWAVQNPNAAQGIEAVSNIFMAAIPIKGIGAVRGKYGLGGITAHPIKRSQMGAIALPKGKSAVSDNFADAAYAKYPSPYHSRNIRSNLEQRYGKENITSSTVPPSNGKNVKLADQRHPKTGVPFDGKGFPNFEKHVKYDT

SEQ ID NO: 522 - protein, 612 aa, Neisseria
MKHFPSKVLTTAILATFCSGALAATNDDDVKKAATVAIAAAYNNGQEINGFKAGETIYDIDEDGTITKKDATAADVEADDFKGLGLKKVVTNLTKTVNENKQNVDAKVKAAESEIEKLTTKLADTDAALADTDAALDATTNALNKLGENITTFAEETKTNIVKIDEKLEAVADTVDKHAEAFNDIADSLDETNTKADEAVKTANEAKQTAEETKQNVDAKVKAAETAAGKAEAAAGTANTAADKAEAVAAKVTDIKADIATNKDNIAKKANSADVYTREESDSKFVRIDGLNATTEKLDTRLASAEKSIADHDTRLNGLDKTVSDLRKETRQGLAEQAALSGLFQPYNVGGSGGGGVAADIGAGLADALTAPLDHKDKGLQSLTLDQSVRKNEKLKLAAQGAEKTYGNGDSLNTGKLKNDKVSRFDFIRQIEVDGQLITLESGEFQVYKQSHSALTAFQTEQIQDSEHSGKMVAKRQFRIGDIAGEHTSFDKLPEGGRATYRGTAFGSDDAGGKLTYTIDFAAKQGNGKIEHLKSPELNVDLAAADIKPDGKRHAVISGSVLYNQAEKGSYSLGIFGGKAQEVAGSAEVKTVNGIRHIGLAAKQLEHHHHHH

SEQ ID NO: 523 - protein, 1403 aa, Neisseria
MKHFPSKVLTTAILATFCSGALAATNDDDVKKAATVAIAAAYNNGQEINGFKAGETIYDIDEDGTITKKDATAADVEADDFKGLGLKKVVTNLTKTVNENKQNVDAKVKAAESEIEKLTTKLADTDAALADTDAALDATTNALNKLGENITTFAEETKTNIVKIDEKLEAVADTVDKHAEAFNDIADSLDETNTKADEAVKTANEAKQTAEETKQNVDAKVKAAETAAGKAEAAAGTANTAADKAEAVAAKVTDIKADIATNKDNIAKKANSADVYTREESDSKFVRIDGLNATTEKLDTRLASAEKSIADHDTRLNGLDKTVSDLRKETRQGLAEQAALSGLFQPYNVGGSGGGGTSAPDFNAGGTGIGSNSRATTAKSAAVSYAGIKNEMCKDRSMLCAGRDDVAVTDRDAKINAPPPNLHTGDFPNPNDAYKNLINLKPAIEAGYTGRGVEVGIVDTGESVGSISFPELYGRKEHGYNENYKNYTAYMRKEAPEDGGGKDIEASFDDEAVIETEAKPTDIRHVKEIGHIDLVSHIIGGRSVDGRPAGGIAPDATLHIMNTNDETKNEMMVAAIRNAWVKLGERGVRIVNNSFGTTSRAGTADLFQIANSEEQYRQALLDYSGGDKTDEGIRLMQQSDYGNLSYHIRNKNMLFIFSTGNDAQAQPNTYALLPFYEKDAQKGIITVAGVDRSGEKFKREMYGEPGTEPLEYGSNHCGITAMWCLSAPYEASVRFTRTNPIQIAGTSFSAPIVTGTAALLLQKYPWMSNDNLRTTLLTTAQDIGAVGVDSKFGWGLLDAGKAMNGPASFPFGDFTADTKGTSDIAYSFRNDISGTGGLIKKGGSQLQLHGNNTYTGKTIIEGGSLVLYGNNKSDMRVETKGALIYNGAASGGSLNSDGIVYLADTDQSGANETVHIKGSLQLDGKGTLYTRLGKLLKVDGTAIIGGKLYMSARGKGAGYLNSTGRRVPFLSAAKIGQDYSFFTNIETDGGLLASLDSVEKTAGSEGDTLSYYVRRGNAARTASAAAHSAPAGLKHAVEQGGSNLENLMVELDASESSATPETVETAAADRTDMPGIRPYGATFRAAAAVQHANAADGVRIFNSLAATVYADSTAAHADMQGRRLKAVSDGLDHNGTGLRVIAQTQQDGGTWEQGGVEGKMRGSTQTVGIAAKTGENTTAAATLGMGRSTWSENSANAKTDSISLFAGIRHDAGDIGYLKGLFSYGRYKNSISRSTGADEHAEGSVNGTLMQLGALGGVNVPFAATGDLTVEGGLRYDLLKQDAFAEKGSALGWSGNSLTEGTLVGLAGLKLSQPLSDKAVLFATAGVERDLNGRDYTVTGGFTGATAATGKTGARNMPHTRLVAGLGADVEFGNGWNGLARYSYAGSKQYGNHSGRVGVGYRF

SEQ ID NO: 524 - protein, 441 aa, Neisseria
MKKYLFRAALYGIAAAILAACQSKSIQTFPQPDTSVINGPDRPVGIPDPAGTTVGGGGAVYTVVPHLSLPHWAAQDFAKSLQSFRLGCANLKNRQGWQDVCAQAFQTPVHSFQAKQFFERYFTPWQVAGNGSLAGTVTGYYEPVLKGDDRRTAQARFPIYGIPDDFISVPLPAGLRSGKALVRIRQTGKNSGTIDNTGGTHTADLSRFPITARTTAIKGRFEGSRFLPYHTRNQINGGALDGKAPILGYAEDPVELFFMHIQGSGRLKTPSGKYIRIGYADKNEHPYVSIGRYMADKGYLKLGQTSMQGIKAYMRQNPQRLAEVLGQNPSYIFFRELAGSSNDGPVGALGTPLMGEYAGAVDRHYITLGAPLFVATAHPVTRKALNRLIMAQDTGSAIKGAVRVDYFWGYGDEAGELAGKQKTTGYVWQLLPNGMKPEYRP

SEQ ID NO: 525 - protein, 420 aa, Neisseria
QSKSIQTFPQPDTSVINGPDRPVGIPDPAGTTVGGGGAVYTVVPHLSLPHWAAQDFAKSLQSFRLGCANLKNRQGWQDVCAQAFQTPVHSFQAKQFFERYFTPWQVAGNGSLAGTVTGYYEPVLKGDDRRTAQARFPIYGIPDDFISVPLPAGLRSGKALVRIRQTGKNSGTIDNTGGTHTADLSRFPITARTTAIKGRFEGSRFLPYHTRNQINGGALDGKAPILGYAEDPVELFFMHIQGSGRLKTPSGKYIRIGYADKNEHPYVSIGRYMADKGYLKLGQTSMQGIKAYMRQNPQRLAEVLGQNPSYIFFRELAGSSNDGPVGALGTPLMGEYAGAVDRHYITLGAPLFVATAHPVTRKALNRLIMAQDTGSAIKGAVRVDYFWGYGDEAGELAGKQKTTGYVWQLLPNGMKPEYRP

SEQ ID NO: 526 - protein, 440 aa, Neisseria
MKTFFKTLSAAALALILAACQSKSIQTFPQPDTSVINGPDRPVGIPDPAGTTVGGGGAVYTVVPHLSLPHWAAQDFAKSLQSFRLGCANLKNRQGWQDVCAQAFQTPVHSFQAKQFFERYFTPWQVAGNGSLAGTVTGYYEPVLKGDDRRTAQARFPIYGIPDDFISVPLPAGLRSGKALVRIRQTGKNSGTIDNTGGTHTADLSRFPITARTTAIKGRFEGSRFLPYHTRNQINGGALDGKAPILGYAEDPVELFFMHIQGSGRLKTPSGKYIRIGYADKNEHPYVSIGRYMADKGYLKLGQTSMQGIKSYMRQNPQRLAEVLGQNPSYIFFRELAGSSNDGPVGALGTPLMGEYAGAVDRHYITLGAPLFVATAHPVTRKALNRLIMAQDTGSAIKGAVRVDYFWGYGDEAGELAGKQKTTGYVWQLLPNGMKPEYRP

SEQ ID NO: 527 - protein, 58 aa, Neisseria
ERRRLLVNIQYESSRAGLDTQIVLGLIEVESAFRQYAISGVGARGLMQVMPFWKNYIG

SEQ ID NO: 528 - protein, 120 aa, Neisseria
VAQKYGVPAELIVAVIGIETNYGKNTGSFRVADALATLGFDYPRRAGFFQKELVELLKLAKEEGGDVFAFKGSYAGAMGMPQFMPSSYRKWAVDYDGDGHRDIWGNVGDVAASVANYMKQ

SEQ ID NO: 529 - protein, 194 aa, Neisseria
ALDGKAPILGYAEDPVELFFMHIQGSGRLKTPSGKYIRIGYADKNEHPYVSIGRYMADKGYLKLGQTSMQGIKSYMRQNPQRLAEVLGQNPSYIFFRELAGSSNDGPVGALGTPLMGEYAGAVDRHYITLGAPLFVATAHPVTRKALNRLIMAQDTGSAIKGAVRVDYFWGYGDEAGELAGKQKTTGYVWQLLP

SEQ ID NO: 530 - protein, 1457 aa, Neisseria; identical to SEQ ID NO: 325

SEQ ID NO: 531 - protein, 1439 aa, Neisseria
MKKTAIAIAVALAGFATVAQAASAGHTYFGINYQYYRDFAENKGKFAVGAKDIEVYNKKGELVGKSMTKAPMIDFSVVSRNGVAALVGDQYIVSVAHNGGYNNVDFGAEGRNPDQHRFTYKIVKRNNYKAGTKGHPYGGDYHMPRLHKFVTDAEPVEMTSYMDGRKYIDQNNYPDRVRIGAGRQYWRSDEDEPNNRESSYHIASAYSWLVGGNTFAQNGSGGGTVNLGSEKIKHSPYGFLPTGGSFGDSGSPMFIYDAQKQKWLINGVLQTGNPYIGKSNGFQLVRKDWFYDEIFAGDTHSVFYEPRQNGKYSFNDDNNGTGKINAKHEHNSLPNRLKTRTVQLFNVSLSETAREPVYHAAGGVNSYRPRLNNGENISFIDEGKGELILTSNINQGAGGLYFQGDFTVSPENNETWQGAGVHISEDSTVTWKVNGVANDRLSKIGKGTLHVQAKGENQGSISVGDGTVILDQQADDKGKKQAFSEIGLVSGRGTVQLNADNQFNPDKLYFGFRGGRLDLNGHSLSFHRIQNTDEGAMIVNHNQDKESTVTITGNKDIATTGNNNSLDSKKEIAYNGWFGEKDTTKTNGRLNLVYQPAAEDRTLLLSGGTNLNGNITQTNGKLFFSGRPTPHAYNHLNDHWSQKEGIPRGEIVWDNDWINRTFKAENFQIKGGQAVVSRNVAKVKGDWHLSNHAQAVFGVAPHQSHTICTRSDWTGLTNCVEKTITDDKVIASLTKTDISGNVDLADHAHLNLTGLATLNGNLSANGDTRYTVSHNATQNGNLSLVGNAQATFNQATLNGNTSASGNASFNLSDHAVQNGSLTLSGNAKANVSHSALNGNVSLADKAVFHFESSRFTGQISGGKDTALHLKDSEWTLPSGTELGNLNLDNATITLNSAYRHDAAGAQTGSATDAPRRRSRRSRRSLLSVTPPTSVESRFNTLTVNGKLNGQGTFRFMSELFGYRSDKLKLAESSEGTYTLAVNNTGNEPASLEQLTVVEGKDNKPLSENLNFTLQNEHVDAGAWRYQLIRKDGEFRLHNPVKEQELSDKLGKAEAKKQAEKDNAQSLDALIAAGRDAVEKTESVAEPARQAGGENVGIMQAEEEKKRVQADKDTALAKQREAETRPATTAFPRARRARRDLPQLQPQPQPQPQRDLISRYANSGLSEFSATLNSVFAVQDELDRVFAEDRRNAVWTSGIRDTKHYRSQDFRAYRQQTDLRQIGMQKNLGSGRVGILFSHNRTENTFDDGIGNSARLAHGAVFGQYGIDRFYIGISAGAGFSSGSLSDGIGGKIRRRVLHYGIQARYRAGFGGFGIEPHIGATRYFVQKADYRYENVNIATPGLAFNRYRAGIKADYSFKPAQHISITPYLSLSYTDAASGKVRTRVNTAVLAQDFGKTRSAEWGVNAEIKGFTLSLHAAAAKGPQLEAQHSAGIKLGYRW

SEQ ID NO: 532 - protein, 164 aa, Neisseria
MKKNILEFWVGLFVLIGAAAVAFLAFRVAGGAAFGGSDKTYAVYADFGDIGGLKVNAPVKSAGVLVGRVGAIGLDPKSYQARVRLDLDGKYQFSSDVSAQILTSGLLGEQYIGLQQGGDTENLAAGDTISVTSSAMVLENLIGKFMTSFAEKNADGGNAEKAAE

SEQ ID NO: 533 - protein, 608 aa, Neisseria; identical to SEQ ID NO: 492

SEQ ID NO: 534 - protein, 584 aa, Neisseria
SDLANDSFIRQVLDRQHFEPDGKYHLFGSRGELAERSGHIGLGKIQSHQLGNLMIQQAAIKGNIGYIVRFSDHGHEVHSPFDNHASHSDSDEAGSPVDGFSLYRIHWDGYEHHPADGYDGPQGGGYPAPKGARDIYSYDIKGVAQNIRLNLTDNRSTGQRLADRFHNAGSMLTQGVGDGFKRATRYSPELDRSGNAAEAFNGTADIVKNIIGAAGEIVGAGDAVQGISEGSNIAVMHGLGLLSTENKMARINDLADMAQLKDYAAAAIRDWAVQNPNAAQGIEAVSNIFMAAIPIKGIGAVRGKYGLGGITAHPIKRSQMGAIALPKGKSAVSDNFADAAYAKYPSPYHSRNIRSNLEQRYGKENITSSTVPPSNGKNVKLADQRHPKTGVPFDGKGFPNFEKHVKYDTKLDIQELSGGGIPKAKPVSDAKPRWEVDRKLNKLTTREQVEKNVQEIRNGNKNSNFSQHAQLEREINKLKSADEINFADGMGKFTDSMNDKAFSRLVKSVKENGFTNPVVEYVEINGKAYIVRGNNRVFAAEYLGRIHELKFKKVDFPVPNTSWKNPTDVLNESGNVKRPRYRSK

SEQ ID NO: 535 - protein, 364 aa, Neisseria
MSMKHFPAKVLTTAILATFCSGALAATSDDDVKKAATVAIVAAYNNGQEINGFKAGETIYDIGEDGTITQKDATAADVEADDFKGLGLKKVVTNLTKTVNENKQNVDAKVKAAESEIEKLTTKLADTDAALADTDAALDETTNALNKLGENITTFAEETKTNIVKIDEKLEAVADTVDKHAEAFNDIADSLDETNTKADEAVKTANEAKQTAEETKQNVDAKVKAAETAAGKAEAAAGTANTAADKAEAVAAKVTDIKADIATNKADIAKNSARIDSLDKNVANLRKETRQGLAEQAALSGLFQPYNVGRFNVTAAVGGYKSESAVAIGTGFRFTENFAAKAGVAVGTSSGSSAAYHVGVNYEW

SEQ ID NO: 536 - protein, 427 aa, Neisseria
MFERSVIAMACIFALSACGGGGGGSPDVKSADTLSKPAAPVVAEKETEVKEDAPQAGSQGQGAPSTQGSQDMAAVSAENTGNGGAATTDKPKNEDEGPQNDMPQNSAESANQTGNNQPADSSDSAPASNPAPANGGSNFGRVDLANGVLIDGPSQNITLTHCKGDSCNGDNLLDEEAPSKSEFENLNESERIEKYKKDGKSDKFTNLVATAVQANGTNKYVIIYKDKSASSSSARFRRSARSRRSLPAEMPLIPVNQADTLIVDGEAVSLTGHSGNIFAPEGNYRYLTYGAEKLPGGSYALRVQGEPAKGEMLAGTAVYNGEVLHFHTENGRPYPTRGRFAAKVDFGSKSVDGIIDSGDDLHMGTQKFKAAIDGNGFKGTWTENGGGDVSGRFYGPAGEEVAGKYSYRPTDAEKGGFGVFAGKKEQD

SEQ ID NO: 537 - protein, 410 aa, Neisseria
CGGGGGGSPDVKSADTLSKPAAPVVAEKETEVKEDAPQAGSQGQGAPSTQGSQDMAAVSAENTGNGGAATTDKPKNEDEGPQNDMPQNSAESANQTGNNQPADSSDSAPASNPAPANGGSNFGRVDLANGVLIDGPSQNITLTHCKGDSCNGDNLLDEEAPSKSEFENLNESERIEKYKKDGKSDKFTNLVATAVQANGTNKYVIIYKDKSASSSSARFRRSARSRRSLPAEMPLIPVNQADTLIVDGEAVSLTGHSGNIFAPEGNYRYLTYGAEKLPGGSYALRVQGEPAKGEMLAGTAVYNGEVLHFHTENGRPYPTRGRFAAKVDFGSKSVDGIIDSGDDLHMGTQKFKAAIDGNGFKGTWTENGGGDVSGRFYGPAGEEVAGKYSYRPTDAEKGGFGVFAGKKEQD

SEQ ID NO: 538 - protein, 488 aa, Neisseria
MFKRSVIAMACIFALSACGGGGGGSPDVKSADTLSKPAAPVVSEKETEAKEDAPQAGSQGQGAPSAQGSQDMAAVSEENTGNGGAVTADNPKNEDEVAQNDMPQNAAGTDSSTPNHTPDPNMLAGNMENQATDAGESSQPANQPDMANAADGMQGDDPSAGGQNAGNTAAQGANQAGNNQAAGSSDPIPASNPAPANGGSNFGRVDLANGVLIDGPSQNITLTHCKGDSCSGNNFLDEEVQLKSEFEKLSDADKISNYKKDGKNDKFVGLVADSVQMKGINQYIIFYKPKPTSFARFRRSARSRRSLPAEMPLIPVNQADTLIVDGEAVSLTGHSGNIFAPEGNYRYLTYGAEKLPGGSYALRVQGEPAKGEMLAGAAVYNGEVLHFHTENGRPYPTRGRFAAKVDFGSKSVDGIIDSGDDLHMGTQKFKAAIDGNGFKGTWTENGSGDVSGKFYGPAGEEVAGKYSYRPTDAEKGGFGVFAGKKEQD

SEQ ID NO: 539 - protein, 712 aa, Neisseria
MNNPLVNQAAMVLPVFLLSACLGGGGSFDLDSVDTEAPRPAPKYQDVFSEKPQAQKDQGGYGFAMRLKRRNWYPQAKEDEVKLDESDWEATGLPDEPKELPKRQKSVIEKVETDSDNNIYSSPYLKPSNHQNGNTGNGINQPKNQAKDYENFKYVYSGWFYKHAKREFNLKVEPKSAKNGDDGYIFYHGKEPSRQLPASGKITYKGVWHFATDTKKGQKFREIIQPSKSQGDRYSGFSGDDGEEYSNKNKSTLTDGQEGYGFTSNLEVDFHNKKLTGKLIRNNANTDNNQATTTQYYSLEAQVTGNRFNGKATATDKPQQNSETKEHPFVSDSSSLSGGFFGPQGEELGFRFLSDDQKVAVVGSAKTKDKPANGNTAAASGGTDAAASNGAAGTSSENGKLTTVLDAVELKLGDKEVQKLDNFSNAAQLVVDGIMIPLLPEASESGNNQANQGTNGGTAFTRKFDHTPESDKKDAQAGTQTNGAQTASNTAGDTNGKTKTYEVEVCCSNLNYLKYGMLTRKNSKSAMQAGESSSQADAKTEQVEQSMFLQGERTDEKEIPSEQNIVYRGSWYGYIANDKSTSWSGNASNATSGNRAEFTVNFADKKITGTLTADNRQEATFTIDGNIKDNGFEGTAKTAESGFDLDQSNTTRTPKAYITDAKVQGGFYGPKAEELGGWFAYPGDKQTKNATNASGNSSATVVFGAKRQQPVR

SEQ ID NO: 540 - protein, 274 aa, Neisseria; identical to SEQ ID NO: 506

SEQ ID NO: 541 - protein, 1082 aa, Neisseria; identical to SEQ ID NO: 500

SEQ ID NO: 542 - protein, 832 aa, Neisseria; identical to SEQ ID NO: 494

SEQ ID NO: 543 - protein, 579 aa, Neisseria; identical to SEQ ID NO: 495

SEQ ID NO: 544 - protein, 793 aa, Neisseria; identical to SEQ ID NO: 496

SEQ ID NO: 545 - protein, 897 aa, Neisseria; identical to SEQ ID NO: 497

SEQ ID NO: 546 - protein, 644 aa, Neisseria; identical to SEQ ID NO: 498

SEQ ID NO: 547 - protein, 858 aa, Neisseria; identical to SEQ ID NO: 499

SEQ ID NO: 548 - protein, 1474 aa, Neisseria; identical to SEQ ID NO: 502

SEQ ID NO: 549 - protein, 1312 aa, Neisseria; identical to SEQ ID NO: 503

SEQ ID NO: 550 - protein, 1447 aa, Neisseria; identical to SEQ ID NO: 504

SEQ ID NO: 551 - protein, 1392 aa, Neisseria; identical to SEQ ID NO: 505

SEQ ID NO: 552 - protein, 648 aa, Neisseria; identical to SEQ ID NO: 508

SEQ ID NO: 553 - protein, 593 aa, Neisseria; identical to SEQ ID NO: 509

SEQ ID NO: 554 - protein, 1312 aa, Neisseria; identical to SEQ ID NO: 510

SEQ ID NO: 555 - protein, 675 aa, Neisseria; identical to SEQ ID NO: 511

SEQ ID NO: 556 - protein, 249 aa, Neisseria
MKKYLFRAALYGIAAAILAAAIPAGNDATTKPDLYYLKNEQAIDSLKLLPPPPEVGSIQFLNDQAMYEKGRMLRNTERGKQAQADADLAAGGVATAFSGAFGYPITEKDSPELYKLLTNMIEDAGDLATRSAKEHYMRIRPFAFYGTETCNTKDQKKLSTNGSYPSGHTSIGWATALVLAEVNPANQDAILERGYQLGQSRVICGYHWQSDVDAARIVGSAAVATLHSDPAFQAQLAKAKQEFAQKSQK

SEQ ID NO: 557 - protein, 467 aa, Neisseria
VKPLRRLTNLLAACAVAAAALIQPALAADLAQDPFITDNAQRQHYEPGGKYHLFGDPRGSVSDRTGKINVIQDYTHQMGNLLIQQANINGTIGYHTRFSGHGHEEHAPFDNHAADSASEEKGNVDEGFTVYRLNWEGHEHHPADAYDGPKGGNYPKPTGARDEYTYHVNGTARSIKLNPTDTRSIRQRISDNYSNLGSNFSDRADEANRKMFEHNAKLDRWGNSMEFINGVAAGALNPFISAGEALGIGDILYGTRYAIDKAAMRNIAPLPAEGKFAVIGGLGSVAGFEKNTREAVDRWIQENPNAAETVEAVFNVAAAAKVAKLAKAAKPGKAAVSGDFADSYKKKLALSDSARQLYQNAKYREALDIHYEDLIRRKTDGSSKFINGREIDAVTNDALIQAKRTISAIDKPKNFLNQKNRKQIKATIEAANQQGKRAEFWFKYGVHSQVKSYIESKGGIVKTGLGD

SEQ ID NO: 558 - protein, 377 aa, Neisseria
MADLAQDPFITDNAQRQHYEPGGKYHLFGDPRGSVSDRTGKINVIQDYTHQMGNLLIQQANINGTIGYHTRFSGHGHEEHAPFDNHAADSASEEKGNVDEGFTVYRLNWEGHEHHPADAYDGPKGGNYPKPTGARDEYTYHVNGTARSIKLNPTDTRSIRQRISDNYSNLGSNFSDRADEANRKMFEHNAKLDRWGNSMEFINGVAAGALNPFISAGEALGIGDILYGTRYAIDKAAMRNIAPLPAEGKFAVIGGLGSVAGFEKNTREAVDRWIQENPNAAETVEAVFNVAAAAKVAKLAKAAKPGKAAVSGDFADSYKKKLALSDSARQLYQNAKYREALDIHYEDLIRRKTDGSSKFINGREIDAVTNDALIQAR

SEQ ID NO: 559 - protein, 353 aa, Neisseria
MADLAQDPFITDNAQRQHYEPGGKYHLFGDPRGSVSDRTGKINVIQDYTHQMGNLLIQQANINGTIGYHTRFSGHGHEEHAPFDNHAADSASEEKGNVDEGFTVYRLNWEGHEHHPADAYDGPKGGNYPKPTGARDEYTYHVNGTARSIKLNPTDTRSIRQRISDNYSNLGSNFSDRADEANRKMFEHNAKLDRWGNSMEFINGVAAGALNPFISAGEALGIGDILYGTRYAIDKAAMRNIAPLPAEGKFAVIGGLGSVAGFEKNTREAVDRWIQENPNAAETVEAVFNVAAAAKVAKLAKAAKPGKAAVSGDFADSYKKKLALSDSARQLYQNAKYREALGKVRISGEILLG

SEQ ID NO: 560 - protein, 672 aa, Neisseria; identical to SEQ ID NO: 512

SEQ ID NO: 561 - protein, 806 aa, Neisseria; identical to SEQ ID NO: 513

SEQ ID NO: 562 - protein, 751 aa, Neisseria; identical to SEQ ID NO: 514

SEQ ID NO: 563 - protein, 806 aa, Neisseria; identical to SEQ ID NO: 515

SEQ ID NO: 564 - protein, 645 aa, Neisseria; identical to SEQ ID NO: 516

SEQ ID NO: 565 - protein, 1444 aa, Neisseria; identical to SEQ ID NO: 517

SEQ ID NO: 566 - protein, 751 aa, Neisseria; identical to SEQ ID NO: 518

SEQ ID NO: 567 - protein, 590 aa, Neisseria; identical to SEQ ID NO: 519

SEQ ID NO: 568 - protein, 1389 aa, Neisseria; identical to SEQ ID NO: 520

SEQ ID NO: 569 - protein, 765 aa, Neisseria; identical to SEQ ID NO: 521

SEQ ID NO: 570 - protein, 612 aa, Neisseria; identical to SEQ ID NO: 522

SEQ ID NO: 571 - protein, 1403 aa, Neisseria; identical to SEQ ID NO: 523

SEQ ID NO: 572 - protein, 488 aa, Neisseria; identical to SEQ ID NO: 538

SEQ ID NO: 573 - protein, 427 aa, Neisseria; identical to SEQ ID NO: 536

SEQ ID NO: 574 - protein, 279 aa, Neisseria
MTRSKPVNRTAFCCLSLTAALILTACSSGGGGVAADIGAGLADALTTPLDHKDKSLQSLTLDQSVRKNEKLKLAAQGAEKTYGNGDSLNTGKLKNDKVSRFDFIRQIEVDGQTITLASGEFQIYKQNHSAVVALQIEKINNPDKIDSLINQRSFLVSGLGGEHTAFNQLPDGKAEYHGKAFSSDDPNGRLHYSIDFTKKQGYGRIEHLKTPEQNVELASAELKADEKSHAVILGDTRYGGEEKGTYHLALFGDRAQEIAGSATVKIREKVHEIGIAGKQ

SEQ ID NO: 575 - protein, 256 aa, Neisseria
MTRSKPVNRTAFCCLSLTTALILTACSSGGGGVAADIGAGLADALTAPLDHKDKGLQSLTLDQSVRKNEKLKLAAQGAEKTYGNGDSLNTGKLKNDKVSRFDFIRQIEVDGQLITLESGEFQVYKQSHSALTAFQTEQIQDSEHSGKMVAKRQFRIGDIAGEHTSFDKLPEGGRATYRGTAFGSDDAGGKLTYTIDFAAKQGNGKIEHLKSPELNVDLAAADIKPDGKRHAVISGSVLYNQAEKGSYSLGIFGGKA

SEQ ID NO: 576 - protein, 234 aa, Neisseria
GLADALTAPLDHKDKSLQSLTLDQSVRKNEKLKLAAQGAEKTYGNGDSLNTGKLKNDKVSRFDFIRQIEVDGQLITLESGEFQIYKQDHSAVVALQIEKINNPDKIDSLINQRSFLVSGLGGEHTAFNQLPSGKAEYHGKAFSSDDPNGRLHYSIDFTKKQGYGRIEHLKTPEQNVELASAELKADEKSHAVILGDTRYGGEEKGTYHLALFGDRAQEIAGSATVKIREKVHET

SEQ ID NO: 577 - protein, 247 aa, Neisseria
VAADIGAGLADALTAPLDHKDKGLQSLMLDQSVRKNEKLKLAAQGAEKTYGNGDSLNTGKLKNDKVSRFDFIRQIEVDGQTITLASGEFQIYKQNHSAVVALQIEKINNPDKIDSLINQRSFLVSGLGGEHTAFNQLPDGKAEYHGKAFSSDDPNGRLHYSIDFTKKQGYGRIEHLKTPEQNVELASAELKADEKSHAVILGDTRYGGEEKGTYHLALFGDRAQEIAGSATVKIREKVHEIGIAGKQ

SEQ ID NO: 578 - protein, 279 aa, Neisseria
MTRSKPVNRTAFCCLSLTAALILTACSSGGGGVAADIGAGLADALTAPLDHKDKSLQSLTLDQSVRKNEKLKLAAQGAEKTYGNGDSLNTGKLKNDKVSRFDFIRQIEVDGQLITLESGEFQIYKQDHSAVVALQIEKINNPDKIDSLINQRSFLVSGLGGEHTAFNQLPDGKAEYHGKAFSSDDAGGKLTYTIDFAAKQGHGKIEHLKTPEQNVELAAAELKADEKSHAVILGDTRYGSEEKGTYHLALFGDRAQEIAGSATVKIGEKVHEIGIAGKQ

SEQ ID NO: 579 - protein, 229 aa, Neisseria
KDKGLQSLTLDQSVRKNEKLKLAAQGAEKTYGNGDSLNTGKLKNDKVSRFDFIRQIEVDGQLITLESGEFQVYKQSHSALTAFQTEQIQDSEHSGKMVAKRQFRIGDIAGEHTSFDKLPEGGRATYRGTAFGSDDAGGKLTYTIDFAAKQGNGKIEHLKSPELNVDLAAADIKPDGKRHAVISGSVLYNQAEKGSYSLGIFGGKAQEVAGSAEVKTVNGIRHIGLAAKQ

SEQ ID NO: 580 - protein, 279 aa, Neisseria; identical to SEQ ID NO: 578

SEQ ID NO: 581 - protein, 228 aa, Neisseria
DKGLQSLTLDQSVRKNEKLKLAAQGAEKTYGNGDSLNTGKLKNDKVSRFDFIRQIEVDGQLITLESGEFQVYKQSHSALTAFQTEQIQDSEHSGKMVAKRQFRIGDIAGEHTSFDKLPEGGRATYRGTAFGSDDAGGKLTYTIDFAAKQGNGKIEHLKSPELNVDLAAADIKPDGKRHAVISGSVLYNQAEKGSYSLGIFGGKAQEVAGSAEVKTVNGIRHIGLAAKQ

SEQ ID NO: 582 - protein, 279 aa, Neisseria
MTRSKPVNRTAFCCLSLTAALILTACSSGGGGVAADIGAGLADALTAPLDHKDKGLQSLTLDQSVRKNEKLKLAAQGAEKTYGNGDSLNTGKLKNDKVSRFDFIRQIEVDGQLITLESGEFQIYKQDHSAVVALQIEKINNPDKIDSLINQRSFLVSGLGGEHTAFNQLPSGKAEYHGKAFSSDDPNGRLHYSIDFTKKQGYGRIEHLKTPEQNVELASAELKADEKSHAVILGDTRYGGEEKGTYHLALFGDRAQEIAGSATVKIREKVHEIGIAGKQ

SEQ ID NO: 583 - protein, 280 aa, Neisseria
MTRSKPVNRTAFCCFSLTAALILTACSSGGGGVAADIGAGLADALTAPLDHKDKSLQSLTLDQSVRKNEKLKLAAQGAEKTYGNGDSLNTGKLKNDKVSRFDFIRQIEVDGQLITLESGEFQVYKQSHSALTALQTEQEQDPEHSGKMVAKRRFKIGDIAGEHTSFDKLPKDVMATYRGTAFGSDDAGGKLTYTIDFAAKQGHGKIEHLKSPELNVELATAYIKPDEKHHAVISGSVLYNQDEKGSYSLGIFGGQAQEVAGSAEVETANGIHHIGLAAKQ

SEQ ID NO: 584 - protein, 225 aa, Neisseria
LQSLTLDQSVRKNEKLKLAAQGAEKTYGNGDSLNTGKLKNDKVSRFDFIRQIEVDGQLITLESGEFQVYKQSHSALTAFQTEQIQDSEHSGKMVAKRQFRIGDIAGEHTSFDKLPEGGRATYRGTAFGSDDAGGKLTYTIDFAAKQGNGKIEHLKSPELNVDLAAADIKPDGKRHAVISGSVLYNQAEKGSYSLGIFGGKAQEVAGSAEVKTVNGIRHIGLAAKQ

SEQ ID NO: 585 - protein, 225 aa, Neisseria; identical to SEQ ID NO: 584

SEQ ID NO: 586 - protein, 280 aa, Neisseria; identical to SEQ ID NO: 583

SEQ ID NO: 587 - protein, 279 aa, Neisseria
MTRSKPVNRTAFCCLSLTAALILTACSSGGGGVAADIGAGLADALTAPLDHKDKSLQSLTLDQSVRKNEKLKLAAQGAEKTYGNGDSLNTGKLKNDKVSRFDFIRQIEVDGQLITLESGEFQIYKQDHSAVVALQIEKINNPDKIDSLINQRSFLVSGLGGEHTAFNQLPSGKAEYHGKAFSSDDPNGRLHYSIDFTKKQGYGRIEHLKTPEQNVELASAELKADEKSHAVILGDTRYGGEEKGTYHLALFGDRAQEIAGSATVKIREKVHEIGIAGKQ

SEQ ID NO: 588 - protein, 279 aa, Neisseria; identical to SEQ ID NO: 578

SEQ ID NO: 589 - protein, 280 aa, Neisseria
MTRSKPVNRTAFCCLSLTAALILTACSSGGGGVAADIGAGLADALTAPLDHKDKSLQSLTLDQSVRKNEKLKLAAQGAEKTYGNGDSLNTGKLKNDKVSRFDFIRQIEVDGQLITLESGEFQVYKQSHSALTALQTEQVQDSEHSGKMVAKRQFRIGDIAGEHTSFDKLPEGGRATYRGTAFGSDDASGKLTYTIDFAAKQGHGKIEHLKSPELNVDLAASDIKPDKKRHAVISGSVLYNQAEKGSYSLGIFGGQAQEVAGSAEVETANGIRHIGLAAKQ

SEQ ID NO: 590 - protein, 279 aa, Neisseria
MTRSKPVNRTAFCCLSLTAALILTACSSGGGGVAADIGAGLADALTAPLDHKDKSLQSLTLDQSVRKNEKLKLAAQGAEKTYGNGDSLNTGKLKNDKVSRFDFIRQIEVDGQTITLASGEFQIYKQNHSAVVALQIEKINNPDKIDSLINQRSFLVSGLGGEHTAFNQLPDGKAEYHGKAFSSDDPNGRLHYSIDFTKKQGYGRIEHLKTPEQNVELASAELKADEKSHAVILGDTRYGGEEKGTYHLALFGDRAQEIAGSATVKIREKVHEIGIAGKQ

SEQ ID NO: 591 - protein, 279 aa, Neisseria; identical to SEQ ID NO: 587

SEQ ID NO: 592 - protein, 279 aa, Neisseria
MTRSKPVNRTAFCCLSLTAALILTACSSGGGGVAADIGAGLADALTAPLDHKDKSLQSLTLDQSVRKNEKLKLAAQGAEKTYGNGDSLNTGKLKNDKVSRFDFIRQIEVDGQLITLESGEFQIYKQDHSAVVALQIEKINNPDKIDSLINQRSFLVSGLGGEHTAFNQLPSGKAEYHGKAFSSDDAGGKLTYTIDFAAKQGHGKIEHLKTPEQNVELASAELKADEKSHAVILGDTRYGGEEKGTYHLALFGDRAQEIAGSATVKIREKVHEIGIAGKQ

SEQ ID NO: 593 - protein, 279 aa, Neisseria; identical to SEQ ID NO: 574

SEQ ID NO: 594 - protein, 280 aa, Neisseria; identical to SEQ ID NO: 589

SEQ ID NO: 595 - protein, 279 aa, Neisseria; identical to SEQ ID NO: 590

SEQ ID NO: 596 - protein, 145 aa, Neisseria
MGNFLYRGISCQQDEQNNGQLKPKGNKAEVAIRYDGKFKYDGKATHGPSVKNAVYAHQIETGLYDGCYISTTTDKEIAKKFATSSGIENGYIYVLNRDLFGQYSIFEYEVEHPENPNEKEVTIRAEDCGCIPEEVIIAKELIEIN

SEQ ID NO: 597 - protein, 150 aa, Neisseria
INNLWEISYLYRGISCQQDEQNNGQLKPKGNKAEVAIRYDGKFKYDGKATHGPSVKNAVYAHQIETDLYDGCYISTTTDKEIAKKFATSSGIENGYIYVLNRDLFGQYSIFEYEVEHPENPDEKEVTIRAEDCGCIPEEVIIAKELIEIN

SEQ ID NO: 598 - protein, 579 aa, Neisseria; identical to SEQ ID NO: 495

SEQ ID NO: 599 - protein, 644 aa, Neisseria; identical to SEQ ID NO: 498

SEQ ID NO: 600 - protein, 456 aa, Neisseria
MKPKPHTVRTLIAAIFSLALSGCVSAVIGSAAVGAKSAVDRRTTGAQTDDNVMALRIETTARSYLRQNNQTKGYTPQISVVGYNRHLLLLGQVATEGEKQFVGQIARSEQAAEGVYNYITVASLPRTAGDIAGDTWNTSKVRATLLGISPATQARVKIVTYGNVTYVMGILTPEEQAQITQKVSTTVGVQKVITLYQNYVQRGSGGGGVAADIGAGLADALTAPLDHKDKGLQSLTLDQSVRKNEKLKLAAQGAEKTYGNGDSLNTGKLKNDKVSRFDFIRQIEVDGQLITLESGEFQVYKQSHSALTAFQTEQIQDSEHSGKMVAKRQFRIGDIAGEHTSFDKLPEGGRATYRGTAFGSDDAGGKLTYTIDFAAKQGNGKIEHLKSPELNVDLAAADIKPDGKRHAVISGSVLYNQAEKGSYSLGIFGGKAQEVAGSAEVKTVNGIRHIGLAAKQ

SEQ ID NO: 601 - protein, 328 aa, Neisseria
MATNDDDVKKAATVAIAAAYNNGQEINGFKAGETIYDIDEDGTITKKDATAADVEADDFKGLGLKKVVTNLTKTVNENKQNVDAKVKAAESEIEKLTTKLADTDAALADTDAALDATTNALNKLGENITTFAEETKTNIVKIDEKLEAVADTVDKHAEAFNDIADSLDETNTKADEAVKTANEAKQTAEETKQNVDAKVKAAETAAGKAEAAAGTANTAADKAEAVAAKVTDIKADIATNKDNIAKKANSADVYTREESDSKFVRIDGLNATTEKLDTRLASAEKSIADHDTRLNGLDKTVSDLRKETRQGLAEQAALSGLFQPYNVG

SEQ ID NO: 602 - protein, 163 aa, Neisseria
MNSLFVDNTVFITRLKAGHIGRLVQALFEEWHGFEPWSSVDKIHAYYGRCLKDDELPLAFAAVDDSGILLGSAAVKRHDMESFPRYEYWLGDVFVLPEYRGKGIGRRLVAHCIGAARSLGIKFLYLYTPDVQIFYESFGWVVVGRHFHNGEWVTVMRLDVDKV

SEQ ID NO: 603 - protein, 131 aa, Neisseria
MPSDVGIRLQTAFKWKLKMKKIFYFLMVVFSTSVWAGDAEDNLLSIQSGYRALLQKQNNLDGKIIGMQSDLEDARRRLQTAQADIARLEAEIPAAMAQKARQAEDLRQIGVRLDHAWNAVYGAGGTKASGN

SEQ ID NO: 604 - protein, 464 aa, Neisseria
MTVKTRFAPSPTGYLHIGGVRTALFSWAFARHHKGEFLLRIEDTDLARSTAESVNIILDGMKWVGLNYDNADNVVYQTRRFDRYKEVIAELLEKGHAYYCYCSKEELEAMREKAEKEGSATYDRRWRPEVGKTLPEIPSDVQPVVRFKTPLDGVTKWTDLVKGEISIPNEALDDLIIARADGTPTYNFCVVVDDYDMGVTHVIRGDDHVNNTPKQINILKAIDANLPEYGHLPMILNEQGKKISKRSGDTVAITDFGAMGILPEAMLNYLARLGWAHGDDEFFTMEQFIEWFDLKDVSPSPSRMDLKKLYWINGEHIKITPNGKLAELVKPRLALRDIHETEKPALEDVLELVKDRPQDLNTLADECFYFYVKQTPAEADVQKHWDDEAAARMLRFAERLEGLEDWNAEAIHDLFKPFCDEEGIKMGKLGMPLRLAVCGTAKTPSVDAVLALIGKEEVLKRIRA

SEQ ID NO: 605 - protein, 214 aa, Neisseria
MNKRLFCSRNGLRYYLLGGFCLSVFPLLLVFASSVWAVYRTGGQVLPPYVRADAALVLGAAAWDKRPSPVFRERINHAIALYQSRRVGKIVFTGGRTKKGYMTEAEVGRRYALKQGVPARNILFENTSRNTYENLNNIRPVLRANGIASVVIVSDPYHLARAAEMAEDLGVRVYMSATPTTRFDAGNKKKIFMLQEGYALSLYRLEKWGRDFFN

SEQ ID NO: 606 - protein, 117 aa, Neisseria
MPEIKIFHNPRCSKSRAALSLLEERGIAAEVVKYLDTPPDLSELKDIFNKLGLASARGMMRVKDDLYKELGLDNPNLDNDALLRAIADHPALLERPIVLANGKAAVGRPLENIEAVL

SEQ ID NO: 607 - protein, 160 aa, Neisseria
MKYLNLAAITLAATFAAHTASADELAGWKDNTPQSLQSLKAPVRIVNLWATWCGPCRKEMPAMSKWYKAQKKGSVDMVGIALDTSDNIGNFLKQTPVSYPIWRYTGANSRNFMKTYGNTVGVLPFTVVEAPKCGYRQTITGEVNEKSLTDAVKLAHSKCR

SEQ ID NO: 608 - protein, 216 aa, Neisseria
MIRFEQVSKTYPGGFEALKNVSFQINKGEMIFIAGHSGSGKSTILKLISGITKPSRGKILFNGQDLGTLSDNQIGFMRQHIGIVFQDHKILYDRNVLQNVILPLRIIGYPPRKAEERARIAIEKVGLKGRELDDPVTLSGGEQQRLCIARAVVHQPGLLIADEPSANLDRAYALDIMELFKTFHEAGTTVIVAAHDETLMADYGHRILRLSKGRLA

SEQ ID NO: 609 - protein, 305 aa, Neisseria
MSIIHYLSLHVESARTALKQLLRQPFGTLLTLMMLAVAMTLPLFMHLGIQSGQSVLGKLNESPQITIYMETSAAQSDSDTVRSLLARDKRLDNIRFIGKEDGLEELQSNLDQNLISMLDGNPLPDVFIVTPDPATTPAQMQAIYRDITKLPMVESASMDTEWVQTLYQINEFIRKILWFLSLTLGMAFVLVAHNTIRLQILSRKEEIEITKLLGAPASFIRRPFLYQAMWQSILSAAVSLGLCGWLLSAVRPLVDAIFKPYGLNIGWRFFYAGELGLVFGFVIALGVFGAWLATTQHLLGFKAKK

SEQ ID NO: 610 - protein, 82 aa, Neisseria
MLTSEQVKAMIEGVAKCEHIEVEGDGHHFFAVIVSSEFEGKARLARHRLIKDGLKAQLESNELHALSISVAATPAEWAAKAQ

SEQ ID NO: 611 - protein, 403 aa, Neisseria
MAFLKLTEQNVQGKTVLIRADMNVPFKDGKISDDTRIRASLASIKYCVDNGASVIVMTHLGRPTEGEFHPEDDVAPVAAHLGSLLGKDVKVLNDWRENKPALNAGDVVMLQNVRINKGEKKNDLELGKAYASLCDVFVNDAFGTAHRAQASTEAVAQAAPVACAGVLMAGELDALGKALKQPARPMVAIVAGSKVSTKLTILESLADKVDQLIVGGGIANTFLLAEGKAIGKSLAEHDLVEESKKIMAKMAAKGGSVPLPTDVVVAKAFAADAEAVVKDIAADAEAVVKDIADVAEDEMILDIGPKSAAALADLLKAAGTVVWNGPVGVFEFDQFAGGTKALAEAIAQSKAFSIAGGGDTLAAIAKFGVTEQIGYISTGGGAFLEFLEGKELPAVAALEKRGA

SEQ ID NO: 612 - protein, 417 aa, Neisseria
MDKLKISANGPLNGEITVSGAKNAALPLMCAGLLTSGTLRLKNVPMLADVKTTQKLLQGMGARVLTDNISEFEINGGTVNNTCAPYELVRTMRASILVLGPTLARFGEAQVSLPGGCAIGSRPVDQHLKGLEAMGAEIVIEHGYVKAKGKLKGTRVAMDVVTVGGTENLLMAATLAEGTTVLENCAIEPEVVDLAECLVKMGAKISGIGTSTMIVEGVDELQGCEHSVVPDRIEAGTFLCAVAITGGRVVLRNAAPKTMEVVLDKLVEAGAVIEAGDDWIAIDMRQRPKAVDIRTVVHPGFPTDMQAQFMALNAVAEGSCRVVETIFENRFMHVPELNRMGANITTEGNTAFVQGVEQLSGAVVKATDLRASASLVIAGLAARGETVVEQIYHLDRGYENIEKKLGSVGAKIERVSG

SEQ ID NO: 613 - protein, 323 aa, Neisseria
MTEYPGIGSPLFYGVFFAAVLVMIALDMFSLKKNGSHKVGVKEALAWSGLWVAVSCLFAGWLYFELAGNPGYGAAVAKEKVLEFFTGYILEKSLAVDNIFVFLMIFGYFKVAPQFQHRVLLYGVLGALVLRTVMIFVGAALVQQFEWILYLFGAFLLYTGIHMMKPEGDEKEDLANSRLLNTVKKVVPVGTEFHGEKFFTVENGKKIATPLFLVLVMIELSDVVFAVDSIPAVFAVTTDPFIVLTSNIFAILGLRAMYFLLADVAERFIFLKYGLAFVLGFIGVKMLVMHWVHIPISVSLSVVFGALGASVLTSLVYTKKTGR

SEQ ID NO: 614 - protein, 149 aa, Neisseria
MSIYAVAHIVHLYCAIAFVGGVFFEVLVLSVLHTGRVSREARREVEKAMSYRAVRVMPFVVGLLFASGIVMAANRYLSILGEPFATSFGTMLTLKILLAFSVLAHFAIAVVKMARSTLTVGWSKYIHAVVFTHMLLIVFLAKAMFYISW

SEQ ID NO: 615 - protein, 423 aa, Neisseria
MFQWLYDVLWLLAPIWIRRYLDKRSGSAPAYRAHRDERFGKPYPNPVTGAVWIHAVSVGETRAAQSLIRELRRRFPDAPLLMTQMTPTGRETAQVLFPDAQCRYLPYDKKTWVRQFLREHRPMFGILMETEIWPNLMRECRRAGVPLFLANARLSEKSLNGYLKVRRLIRPAAASLTGCLAQTEADAARLAKLGAASVQVCGNTKYDIIPSEQMKTLAGQFEKRIGGRPVAVCGSTRVYRGEDEAEKLLAAWQQYRGDALLVVVPRHPEHFQTVFETAKRFGFKVQRRSDGLPVEPDTQVWIGDSMGELYAYYLCADVAFVGGSLVDSGCQNIIEPLSCGVPTIFGFSTYNFSEACRHALASGAAVQVESADAWREAVEKTLSSEGGGMQMQARVDGFIAQHRGAGARIAEAVREAVCGYRGR

SEQ ID NO: 616 - protein, 482 aa, Neisseria
MNGDIGVIGLAVMGQNLILNMNDCGFKVVAYNRTTAKVDEFLNGAAKGTNIIGAYSLQDLVDKLEKPRKIMMMVRAGSVVDEFIEQLLPLLEEGDILIDGGNANYPDTTRRTHYLAEKGILFVGAGVSGGEEGARRGPSIMPGGDKRAWDAVKPIFQAIAAKTSQGEPCCDWVGKDGAGHFVKMVHNGIEYGDMQLICEAYQFMKDGLGLSYDEMYRVFAEWNKTELDSYLIEITAAILGYKDEGGEPLVEKILDTAGQKGTGKWTGINALDLGIPLTLISEAVFARCVSSFKEQRVQTGKLFARTVTPVEGGKQEWVEALRQALLASKIISYAQGFMLIREAGESYGWDLDYGNTALLWREGCIIRSAFLSNIRDAYENNPDLVFLGADPYFKNILENCLPAWRKVVAKAVECGIPMPCMASAITFLDGYTTERLPANLLQAQRDYFGAHTYERTDKPRGEFFHTNWTGKGGDTASTTYDI

SEQ ID NO: 617 - protein, 78 aa, Neisseria
MKNSFCGQFACCANGILLFFTEWLPMSLRTGILWRFERKVCLELVEMVRCRHECLISAYRQSAHPNLCISGGKNEICG

SEQ ID NO: 618 - protein, 307 aa, Neisseria
MLQRTLAKSISVTGVGLHSGERVALTLHPAPENSGISFRRTDLDGEMGEQIKLTPYLINDTRLSSTIVTDKGVRVGTIEHIMSALSAYGIDNALIELNAPEIPIMDGSSLPFIYLLQDAGVVDQKAQKRFLKILKPVEIKEAGKWVRFTPYDGFKVTLTIEFDHPVFNRSSPTFEIDFAGKSYIDEIARARTFGFMHEVEMMRAHNLGLGGNLNNAIVIDDTDVLNPEGLRYPDEFVRHKILDAIGDLYIVGHPIVGAFEGYKSGHAINNALLRAVLADETAYDRVEFADSDDLPDAFHELNIRTCG

SEQ ID NO: 619 - protein, 170 aa, Neisseria
MNTLQKGFTLIELMIVIAIVGILAAVALPAYQDYTARAQVSEAILLAEGQKSAVTEYYLNHGEWPGNNTSAGVATSSEIKGKYVKSVEVKNGVVTAQMASSNVNNEIKGKKLSLWAKRQNGSVKWFCGQPVTRDKAKAANDDVTAAAAANGKKIDTKHLPSTCRDASDAS

SEQ ID NO: 620 - protein, 136 aa, Neisseria
MAEGQKSAVTEYYLNHGEWPGNNSSAGVATSADIKGKYVKSVEVKNGVVTAQMASSNVNNEIKGKKLSLWAKRQAGSVKWFCGLPVTRADNAKDDAVTAAATGTDKIDTKHLPSTCRDDSSVVCIETPPTAFYKNT

SEQ ID NO: 621 - protein, 124 aa, Neisseria
MAEGQKSAVTEYYLNHGEWPGNNSSAGVATSANIKGKYVEKVEVKNGVVTATMLSSGVNKEIQGKKLSLWAKRQDGSVKWFYGQPVKRDNASADAVKADTAANGKQIDTKHLPSTASTRKSTPN

SEQ ID NO: 622 - protein, 124 aa, Neisseria
MVEGQKSAVTEYYLNHGEWPGDNSSAGVATSSEIKGKYVKSVEVKNGVVTAQMASSNVNNEIKGKKLSLWAKRQNGSVKWFCGQPVTRDKAKDDAVTAATGKGTANINTKHLPSTAPTRKSTPN

SEQ ID NO: 623 - protein, 112 aa, Neisseria
MTGFNDAAGVASSSTIKGKYVKEVEVKNGVVTATMLSTGVNNEIKGKKLSLWAKRQAGSVKWFCGQPVTRADNAKDDVAAATGTDKIDTKLKKPFYPISFRTDEAGFPLLRE

SEQ ID NO: 624 - protein, 135 aa, Neisseria
MAEGQKSAVTEYYLNHGEWPGNNTSAGVASSSTIKGKYVKEVTVANGVITATMLSSGVNKEIQGKKLSLWAKRQDGSVKWFCGQPVTRTDAKADTVAAAAKTADNINTKHLPSTCRDASSVVCIETPPTAFYKNT

SEQ ID NO: 625 - protein, 198 aa, Neisseria
MTGFNDAAGVASSSDIKGKYVEKVEVKNGVVTATMLSSGVNKEIKGKKLSLWAKRQNGSVKWFCGQPVTRNDTATATATDVAAANGKTDDKINTKHLPSTCRDDSSTGCIETPRADFKHFQKISRYRVLPESRQMAEKLRHSRKSGNLVRWFQLFRINFETLIPSFPRKWESRTQNLKKPFYPISFRTDRPGFPPARE

SEQ ID NO: 626 - protein, 225 aa, Neisseria
MTGFNDAAGVASSSKIKGKYVKEVTVANGVVTATMLSSGVNKEIQGKKLSLWAKRQNGSVKWFCGQPVTRAGTDDTVAADNTGNKKTNTKHLPSTCRDAASAVCTKTPEYYPNHGEWPKNNTSAGVASSSTIKGKYVKEVTVANGVITATMLSSGVNKEIQGKKLSLWAKRQDGSVKWFCGQPVTRNAANAKAGTDEVTAATPDTDKINTKHLPSTAPTRKSTPN

SEQ ID NO: 627 - protein, 115 aa, Neisseria
MASSGVNKEIKGRKLSLWAKRQAGSVKWFCGQPVERDNAKAANDDVTAAAAANGKKIDTKHLPSTCRDAASAVCTKHPSIARITANGRKTSSFPRRRESRSVGTETYRVKRFLRS

SEQ ID NO: 628 - protein, 109 aa, Neisseria
MGGLIIEDLQEGFGKEAVKGKEITVHYTGWLENGTKFDSSLDRRQPLTITLGVGQVIKGWDEGFGGMKEGGKRKLTIPSEMGYGAHGAGGVIPPHATLIFEVELLKVYE

SEQ ID NO: 629 - protein, 72 aa, Neisseria
MLKTLTFAALHFSVAFSVTYVLTGSIGVSGAVALVEPLINTVVFYFHEKAWNLYEKNKTVKQTQPFQLHRCS

SEQ ID NO: 630 - protein, 317 aa, Neisseria
MNHKKIVVLDADTLPGRVFHFDFPHELAVYGTTGADETAERVRDAHIVITNKVMISADIIAANPQLELIAVSATGVNNVDIGAAKAAGVAVCNVRAYGNESVAEHAFMLMIALMRNLPAYQRDVAAGLWEKSPFFCHYGAPIRDLNGKTLAVFGRGNIGRTLAGYAQAFGMGVVFAEHKHASAVREGYVSFEDAVRAADVLSLHCPLNAQTENMIGENELRQMKPGAVLINCGRGGLVDENALLAALKYGQIGGAGVDVLTNEPPKNGNPLLNARLPNLIVTPHTAWASREALDRLFDILLANIHAFVKGEAQNRVV

SEQ ID NO: 631 - protein, 685 aa, Neisseria
MTRKILVTSALPYANGSIHLGHMVEHIQTDVWVRFQKLRGHACHYCCADDTHGTPVMLAAQKQGIAPEDMIAKVREEHLADFTGFFIGYDNYYSTHSPENKQFSQDIYRALKANGKIESRVIEQLFDPEKQMFLPDRFVKGECPKCHAQDQYGDNCEVCGTTYSPTELINPYSAVSGTKPELRESEHFFFKLGECADFLKAWTSGNNPHDGKPHLQAEALNKMKEWLGEGEETTLSDWDISRDAPYFGFEIPDAPGKYFYVWLDAPVGYMASFKNLCDRIGVDFDEYFKADSQTEMYHFIGKDILYFHALFWPAMLHFSGHRAPTGVYAHGFLTVDGQKMSKSRGTFITAKSYLEQGLNPEWMRYYIAAKLNSKIEDIDLNLQDFISRVNSDLVGKYVNIAARASGFIAKRFEGRLKDVADSELLAKLTAQSEAIAECYESREYAKALRDIMALADIVNEYVDANKPWELAKQEGQDERLHEVCSELINAFTMLTAYLAPVLPQTAANAAKFLNLEAITWANTRDTLGKHAINKYEHLMQRVEQKQVDDLIEANKQSIAAAAAPAAEEGKYEKVAEQASFDDFMKIDMRVAKVLNCEAVEGSTKLLKFDLDFGFEKRIIFSGIAASYPNPAELNGRMVIAVANFAPRKMAKFGVSEGMILSAATADGKLKLLDVDTGAQPGDKVG

SEQ ID NO: 632 - protein, 612 aa, Neisseria
MCGIVGAIRAHHNVVDFLTDGLKRLEYRGYDSSGIAVNTDGKIKRVRRVGRVQLMEDAAREKGISGGIGIGHTRWATHGGVTEPNAHPHISGGMIAVVHNGIIENFESERKRLEGLGYRFESQTDTEVIAHSINHEYAQNGGRLFEAVQEAVKRFHGAYAIAVIAQDKPDELVVARMGCPLLVALGDDETFIASDVSAVIAFTRRVAYLEDGDIALLASDGIKRLTDKNGLPAERKVKVSELSLASLELGLYSHFMQKEIHEQPRAIADTAEVFLDGGFIPENFGKDAKSVFESIRSVKILACGTSYYAALTAKYWLESIAKIPSDVEIASEYRYRSVIADSDQLVITISQSGETLDTMEALKYAKSLGHRHSLSICNVMESALPRESSLVLYTRAGAEIGVASTKAFTTQLVALFGLAVTLAKVRGLVSEEDEARYTEELRQLPGSVQHALNLEPQIAAWAQQFAKKTSALFLGRGIHYPIALEGALKLKEITYIHAEAYPAGELKHGPLALVDENMPVVVIAPNDSLLDKVKANMQEVGARGGELFVFADLDSNFNATEGVHVIRAPRHVGKLSPVVHTIPVQLLAYHTALARGTDVDKPRNLAKSVTVE

SEQ ID NO: 633 - protein, 175 aa, Neisseria
MEMKQMLLAVGVVAVLAGCGKDAGGYEGYWREKSDKKEGMIAVKKEKGNYFLNKIHVVTGKEESLLLSEKDGALSINTGIGEIPIKLSDDGKELYVERRQYVKTDAAMKDKIIAHQKKCGQTAQAYRDARNALPSNQTYQQHLAAIEQLKRRFEAEFDELEKEIKCNGRSPALLL

SEQ ID NO: 634 - protein, 441 aa, Neisseria
MKKYLFRAALYGIAAAILAACQSKSIQTFPQPDTSVINGPDRPVGIPDPAGTTVGGGGAVYTVVPHLSLPHWAAQDFAKSLQSFRLGCANLKNRQGWQDVCAQAFQTPVHSFQAKQFFERYFTPWQVAGNGSLAGTVTGYYEPVLKGDDRRTAQARFPIYGIPDDFISVPLPAGLRSGKALVRIRQTGKNSGTIDNTGGTHTADLSRFPITARTTAIKGRFEGSRFLPYHTRNQINGGALDGKAPILGYAEDPVELFFMHIQGSGRLKTPSGKYIRIGYADKNEHPYVSIGRYMADKGYLKLGQTSMQGIKSYMRQNPQRLAEVLGQNPSYIFFRELAGSSNDGPVGALGTPLMGEYAGAVDRHYITLGAPLFVATAHPVTRKALNRLIMAQDTGSAIKGAVRVDYFWGYGDEAGELAGKQKTTGYVWQLLPNGMKPEYRP

SEQ ID NO: 635 - protein, 279 aa, Neisseria
MLVAFLIMLREGIEAALIVGIVAGFLKQSGHSKLMPKVWFGVVLASLMCLGLGYGIHSATGEIPQKQQEFVVGIIGLVAVAMLTYMILWMKKAARSMKRQLQDSVQAALNRGSGQGWALVGMAFLAVAREGLESVFFLLAVFKQSPTWQMPAGAVAGVLAAAVIGALIYQGGMRLNLAKFFRWTGAFLIVVAAGLLAGSLRALHEAGIWNALQDIVFDSSKYLHEDSPLGVLLGGFFGYTDHPTQGETLVWLLYLIPVITWFLCGSRPSETLTRKEELK

SEQ ID NO: 636 - protein, 388 aa, Neisseria
MRKFNLTALSVMLALGLTACQPPEAEKAAPAASGEAQTANEGGSVSIAVNDNACEPMELTVPSGQVVFNIKNNSGRKLEWEILKGVMVVDERENIAPGLSDKMTVTLLPGEYEMTCGLLTNPRGKLVVTDSGFKDTANEADLEKLSQPLADYKAYVQGEVKELVAKTKTFTEAVKAGDIEKAKSLFADTRVHYERIEPIAELFSELDPVIDAREDDFKDGAKDAGFTGFHRIEYALWVEKDVSGVKEIAAKLMTDVEALQKEIDALAFPPGKVVGGASELIEEVAGSKISGEEDRYSHTDLSDFQANVDGSKKIVDLFRPLIEAKNKALLEKTDTNFKQVNEILAKYRTKDGFETYDKLGEADRKALQASINALAEDLAQLRGILGLK

SEQ ID NO: 637 - protein, 421 aa, Neisseria
MSKKQPAQPTRRTLFKTAIAAGAVGAIGGYLGGKKQGETAERTAESQHSPQAYPCYGEHQAGIVTPQQAFSIMCAFDVTAQSAKQLENLFRTLTARIEFLTQGGEYQDGDDKLPPAGSGILGKAFNPDGLTVTVGVGSSLFDGRFGLKDKKPIHLQEMRDFSNDKLQKSWCDGDLSLQICAFTPETCQAALRDIIKHTVQTAVIRWSIDGWQPKSEPGAMAARNLLGFRDGTGNPKVSDPKTADEVLWTGVAANSLDEPEWAKNGSYQAVRLIRHFVEFWDRTPLQEQTDIFGRRKYSGAPMDGKKEADQPDFAKDPEGDITPKDSHIRLANPRDPEFLKKHRLFRRAYSYSRGLASSGQLDVGLVFVCYQANLADGFIFVQNLLNGEPLEEYISPFGGGYFFVLPGVEKGGFLGQGLLGV

SEQ ID NO: 638 - protein, 109 aa, Neisseria
MSLPPCPQCASEYTYEDGGQYICPECAHEWNETESAADLAAQVRDANGAVLQNGDTVILIKDLKVKGSSMVIKQGTKVKGIRLQEGDHNIGCKIDGSAMNLKSEFVKKA

SEQ ID NO: 639 - protein, 456 aa, Neisseria
MPQNTLNIVILAAGKGTRMYSKMPKVLHRIGGKPMVGRVIDTAAALNPQNICVVIGHGKEQVLDTVKRDVVWVEQTEQLGTGHAVKTALPHLSAEGRTLVLYGDVPLIDVETLETLLEAAGNEVGLLTDVPNDPTGLGRIIRDSNGSVTAIVEEKDADAVQKAVKEINTGILVLPNAKLENWLNSLSSNNAQGEYYLTDLIAKAVADGIKVHPVQVRASHLAAGVNNKLQLTELERIFQTEQAQELLKAGVTLRDPARFDLRGRLKHGQDVVIDVNCIFEGDIELGDNVEIGANCVIKNAKIGANSKIAPFSHLESCEVGENNRIGPYARLRPQARLADDVHVGNFVEIKNAAIGKGTKANHLTYIGDAEVGCKTNFGAGTIIANYDGVHKHKTVIGDEVRIGSNCVLVAPVTLGNKVTTGAGSTITRNVEDNKLALARARQTVIEGWVRPEKDKQ

SEQ ID NO: 640 - protein, 90 aa, Neisseria
MRKTFLFLTAAAALLSGCAWETYQDGNGKTAVRQKYPAGTPVYYQDGSYSKNMNYNQYRPERHAVLPNQTGNNADEEHRQHWQKPKFQNR

SEQ ID NO: 641 - protein, 237 aa, Neisseria
MQENPTVWLFDLDNTLHDADAGIFTLINRAMTRYMARRLKLSESAASDLRQDYWHRYGATLAGLQIHHPEIDIAEFLRESHPIDAILTRLHGMPETQNTLSRLKGRKAVFSNGPSFYVRAVVNALGLENRFDALFGTDDFGLLYKPNPQAYLNVCRLLDVPPECCIMVDDSADNLHQAKALGMKTVRFGAKSHALPFIDASVSDMAQLARYAETLSEHRQNHYNTPYPPKIRKKSHA

SEQ ID NO: 642 - protein, 333 aa, Neisseria
MKRKIWLLPLLAVSAYLQAQTEVRLAVHKSFSLPKGLIARFERANDAKVSIIQAGGANEMLNKLILSRANPIADAVYGLDNANIGKAREMGILAAAQPESAPVAVGLPSALAVDYGYVSINYDKKWFEGKKLPLPQTLQDLTRPEYKNLLVVPSPATSSPGLGFLMANISGLGEESAFKWWAQMRQNGVKVAKGWSEAYYTDFSHNGGAYPLVVGYAASPAAEVYFSKGKYSEPPTGNLFLKGGVFRQVEGAAVLKGAKQPELAAKLVQWLQSREVQQAVPSEMWVYPAVKNTRLPDVFRFAQAPTHTTAPAQRDIDANQRGWVSRWIRTVLK

SEQ ID NO: 643 - protein, 282 aa, Neisseria
MDFKQFDFLHLISVSGWEHLAEKAWAFGLNLAAALLIFLVGKWAAKRIVAVMRAAMTRAQVDATLISFLCNVANIGLLILVIIAALGRLGVSTTSVTALIGGAGLAVALSLKDQLSNFAAGALIILFRPFKVGDFIRVGGFEGYVREIKMVQTSLRTTDNEEVVLPNSVVMGNSIVNRSTLPLCRAQVIVGVDYNCDLKVAKEAVLKAAVEHPLSVQNEERQAAAYITALGDNAIEITLWAWANEADRWTLQCDLNEQVVENLRKVNINIPFPQRDIHIINS

SEQ ID NO: 644 - protein, 161 aa, Neisseria
MDALHTIARNLTKKRQTVSCAESCTGGMLAAAFTSVAGSSQWFDQSFVTYSNKAKEDRLGVLPETLLEHGAVSRQTVYEMARGAKAVAQADYAVGISGIAGPGGGSESKPVGTVWFGFAFPGGSCEAMRRFDGNRESVRAQAVAFALERLAGLIENGGDAV

SEQ ID NO: 645 - protein, 522 aa, Neisseria
MKHRTFFSLCAKFGCLLALGACSPKIVDAGAATVPHTLSTLKTADNRPASVYLKKDKPTLIKFWASWCPLCLSELGQTEKWAQDAKFSSANLITVASPGFLHEKKDGDFQKWYAGLNYPKLPVVTDNGGTIAQSLNISVYPSWALIGKDSDVQRIVKGSINEAQALALIRDPNADLGSLKHSFYKPDTQKKDSKIMNTRTIYLAGGCFWGLEAYFQRIDGVVDAVSGYANGNTKNPSYEDVSYRHTGHAETVKVTYDADKLSLDDILQYFFRVVDPTSLNKQGNDTGTQYRSGVYYTDPAEKAVIAAALKREQQKYQLPLVVENEPLKNFYDAEEYHQDYLIKNPNGYCHIDIRKADEPLPGKTKTAPQGKGFDAATYKKPSDAELKRTLTEEQYQVTQNSATEYAFSHEYDHLFKPGIYVDVVSGEPLFSSADKYDSGCGWPSFTRPIDAKSVTEHDDFSYNMRRTEVRSHAADSHLGHVFPDGPRDKGGLRYCINGASLKFIPLEQMDAAGYGALKGKVK

SEQ ID NO: 646 - protein, 421 aa, Neisseria
MFSFFRRKKKQETPALEEAQIQETAAKAESELAQIVENIKEDAESLAESVKGQVESAVETVSGAVEQVKETVAEMLSEAEEAAEKAAEQVEAAKEAVAETVGEAVGQVQEAVATTEEHKLGWAARLKQGLTKSRDKMAKSLAGVFGGGQIDEDLYEELETVLITSDMGMEATEYLMKDVRDRVSLKGLKDGNELRGALKEALYDLIKPLEKPLVLPETKEPFVIMLAGINGAGKTTSIGKLAKYFQAQGKSVLLAAGDTFRAAAREQLQAWGERNNVTVISQTTGDSAAVCFDAVQAAKARGIDIVLADTAGRLPTQLHLMEEIKKVKRVLQKAMPDAPHEIIVVLDANIGQNAVNQVKAFDDALGLTGLIVTKLDGTAKGGILAALASDRPVPVRYIGVGEGIDDLRPFDARAFVDALLD

SEQ ID NO: 647 - protein, 74 aa, Neisseria
MPSENSRPMPSFPRRRESRPWDNGNIQRLSESPRFWIPTFVGMTGCRFVGMTWCRFPYGWIRHSRAGGNLERKI

SEQ ID NO: 648 - protein, 94 aa, Neisseria
MQPAVYILASQRNGTLYIGVTSDLVQRIYQHREHLIEGFTSRYNVTMLVWYELHPTMESAITREKQLKKWNRAWKLQLIEENNVSWQDLWFDII

SEQ ID NO: 649 - protein, 716 aa, Neisseria; identical to SEQ ID NO: 53

SEQ ID NO: 650 - protein, 408 aa, Neisseria
MNTDNLHDILDEMVQVYSQKKQSRSETPAEIGAHFHPLLDRLCETAEAQNASDILISKGFPPSLKINSALTPQPQKALTGEETAAIAASTMNAEQSEIFRRDGEINYSVQSRSGTRYRANAYHSQGSAGLVLRRINHVIPQMQELGLPEKLKDLAVAPRGLLIIVGPTGSGKSTTMATMLEHRNKTLPSHIVTIEDPIEFIYKPRRCIFTQREIGVDTINWQTAVQNAMRQSPDVVCIGEVRSRESMEYAMQLAQTGHLCIFTLHANTAPQSLERILNFYPKEQHNQILIDIALNLTGIICQRLALKQDKTGRTAVVDLLINTPAIQDFILKGDLMNISKIMETAKTDGMQTMDQNLFELYRHGIISYEEALRQSVSANNLRLHIQLHKEGKTPELLYDRVNGLNLIS

SEQ ID NO: 651 - protein, 347 aa, Neisseria
MQITDLLAFGAKNKASDLHLSSGISPMIRVHGDMRRINLPEMSAEEVGNMVTSVMNDHQRKIYQQNLEVDFSFELPNVARFRVNAFNIGRGPAAVFRTIPSTVLSLEELKAPSIFQKIAESPRGMVLVTGPTGSGKSTTLAAMINYINETQPAHILTIEDPIEFVHQSKKSLINQRELHQHTLSFANALRSALREDPDVILVGEMRDPETIGLALTAAETGHLVFGTLHTTGAAKTVDRIVDVFPAGEKEMVRSMLSESLTAVISQNLLKTHDGNGRVASHEILIANPAVRNLIRENKITQINSVLQTGQASGMQTMDQSLQSLVRQGLIAPEVARRRAQNSESMSF

SEQ ID NO: 652 - protein, 228 aa, Neisseria
MTVLQERYCEVSDRIGKLVLQAGREPHSVSLIAVGKTFPSDGIREVYAAGQRDFGENYIQEWYGKTEELADLTDIVWHVIGDVQSNKTKFVAERAHWVHTVCRLKTAVRLSGQRPSSMPPLQVCIEVNIAGEAVKHGVAPEEAVALAVEVAKLPNIVVRGLMCVAKANSSETELKVQFQTMRKLLADLNAAGVKADVLSMGMSDDMPAAIECGATHVRIGSAIFGKRG

SEQ ID NO: 653 - protein, 135 aa, Neisseria; identical to SEQ ID NO: 429

SEQ ID NO: 654 - protein, 263 aa, Neisseria
MNVYFLGGGNMAAAVAGGLVKQGGYRIYIANRGAEKRERLEKELGVETSATLPELHSDDVLILAVKPQDMEAACKNIRTNGALVLSVAAGLSVGTLSRYLGGTRRIVRVMPNTPGKIGLGVSGMYAEAEVSETDRRIADRIMKSVGLTVWLDDEEKMHGITGISGSGPAYVFYLLDALQNAAIRQGFDMAEARALSLATFKGAVALAEQTGEDFEKLQKNVTSKGGTTHEAVEAFRRHRVAEAISEGVCACVRRSQEMERQYQ

SEQ ID NO: 655 - protein, 138 aa, Neisseria
MAKLTEQDILNWSGPEDDYMNDDHLAFFRELLVKMQDELIENASATTGHLQEHESAPDPADRATQEEEYALELRTRDRERKLLSKIQATIRNIDEGDYGFCADTGEPIGLKRLLARPTATLSVESQERRERMKKQFAD

SEQ ID NO: 656 - protein, 118 aa, Neisseria
MSVMAGRHPYGVRSGLRRNGLKLWDIHFRMTRFIVARCGLLFATLKGKTMKKMFVLFCMLFSCAFSLAAVNINAASQQELEALPGIGPAVLAKLKDQASVGAPAPKGPAKPVLPADKK

SEQ ID NO: 657 - protein, 52 aa, Neisseria
MPSEHAFGRRFYNKNTSWRLVLCLSKFLCRAYLKISDGIGLCCLKSVFRFSL

SEQ ID NO: 658 - protein, 373 aa, Neisseria
MSNQDFYATLGVARTATDDEIKKAYRKLAMKYHPDRNPDNKEAEEKFKEVQKAYETLSDKEKRAMYDQYGHAAFEGGGQGGFGGFGGFGGAQGFDFGDIFSQMFGGGSGRAQPDYQGEDVQVGIEITLEEAAKGVKKRINIPTYEACDVCNGSGAKPGTSPETCPTCKGSGTVHIQQAIFRMQQTCPTCHGAGKHIKEPCVKCRGAGRNKAVKTVEVNIPAGIDDGQRIRLSGEGGPGMHGAPAGDLYVTVRIRAHKIFQRDGLDLHCELPISFATAALGGELEVPTLDGKVKLTVPKETQTGRRMRVKGKGVKSLRSSATGDLYCHIVVETPVNLTDRQKELLEEFERISTGLENQTPRKKSFLDKLRDLFD

SEQ ID NO: 659 - protein, 672 aa, Neisseria
MNKSLSSSVEEYRELTLRGMILGALITVIFTASNVYLGLKVGLTFASSIPAAVISMAVLKFFKGSNILENNMVQTQASAAGTLSTIIFVLPGLLMAGYWSGFPFWQTTLLCIAGGILGVIFTIPLRYAMVVKSDLPYPEGVAAAEILKVGGHEEGDNRQGGSGIKELAAGGALAGLMSFCAGGLRVIADSASYWFKSGTAIFQLPMGFSLALLGAGYLVGLTGGIAILLGISIAWGIAVPYFSSHIPQPSDMEMAAFAMKLWKEKVRFIGAGTIGIAAVWTLLMLLKPMVEGMKMSFKSFGGGAPAAERAEQDLSPKAMIFWVLAMMFVLGVSFYHFIGDSHITGGMAWLLVVVCTLLASVIGFLVAAACGYMAGLVGSSSSPISGVGIVSVVVISLVLLLVGESGGLLADEANRKFLLALTLFCGSAVICVASISNDNLQDLKTGYLLKATPWRQQVALIIGCIVGALVISPVLELLYEAYGFTGAMPREGMDAAQALAAPQATLMTTIASGIFAHNLEWVYIFTGIVIGAVLIVVDLVLKKSSGGKLALPVLAVGMGIYLPPSVNMPIVAGAVLAAVLKHIIGKKAENREGRLKNAERIGTLFSAGLIVGESLIGVIMAFIIAFSVTNGGSDAPLALNLQNWDAAASWLGLAFFVTGMFFFAQRVLKAGK

SEQ ID NO: 660 - protein, 288 aa, Neisseria
MKGIILAGGSGTRLYPITRGVSKQLLPVYDKPMIYYPLSVLMLAGIRDILVITAPEDNASFKRLLGDGSDFGISISYAVQPSPDGLAQAFIIGEEFIGNDNVCLVLGDNIFYGQSFTQTLKQAAAQTHGATVFAYQVKNPERFGVVEFNENFRAVSIEEKPQRPKSDWAVTGLYFYDNRAVEFAKQLKPSARGELEITDLNRMYLEDGSLSVQILGRGFAWLDTGTHESLHEAASFVQTVQNIQNLHIACLEEIAWRNGWLSDEKLEELARPMAKNQYGQYLLRLLKK

SEQ ID NO: 661 - protein, 355 aa, Neisseria
MRKILVTGGAGFIGSAVVRHIIRNTRDAVVNVDKLTYAGNLESLTEVADNPRYAFEQVDICDRAELDRVFAQYRPDAVMHLAAESHVDRSIGSAGEFIQTNIVGTFNLLEAARAYWQQMPSEQHEAFRFHHISTDEVYGDLGGTDDLFTETAPYAPSSPYSASKASSDHLVRAWLRTYGLPTIVTNCSNNYGPYHFPEKLIPLMILNALDGKPLPVYGDGMQIRDWLFVEDHARALYQVVTEGVVGETYNIGGHNEKANIEVVKTICALLEELAPEKPAGVARYEDLITFVQDRPGHDVRYAVDAAKIRRDLGWLPLETFESGLRKTVQWYLDNKTWWQNVLNGSYRLERLGTGK

SEQ ID NO: 662 - protein, 339 aa, Neisseria
MKKILVTGGTGFIGSHTVVSLLKSGHQVVILDNLCNSSINILPRLKTITGQEIPFYQGDIRDREILRRIFAENRIDSVIHFAGLKAVGESVAEPMKYYDNNVSGSLVLAEEMARAGVFSIVFSSSATVYGDPGKVPYTEDMPPGDTTSPYGASKSMVERILTDIQKADPRWSMILLRYFNPIGAHESGLIGEQPNGIPNNLLPYICQVAAGKLPQLAVFGDDYPTPDGTGMRDYIHVMDLAEGHVAAMQAKSNVAGTHLLNLGSGRASSVLEIIRAFEAASGLTIPYEVKPRRAGDLACFYADPSYTKAQIGWQTQRDLTQMMEDSWRWVSNNPNGYDD

SEQ ID NO: 663 - protein, 308 aa, Neisseria
MHQYYDAVILSVGNGLLKRFFKQNAQLNIASRPLIITLFPGVVFGDQASILSRMGADIVLYNNKHDFRIAEEYKKQYKLSCQNILYGYPIFRHASKGCHGEKIYFIDQVKIPFKKEERIYTLKKLIALAEKYPEKEFTILLRVADKDITVHQDKHSYIELAKQFQLPSNLTIERKSTAQAFQEMGYCLSYSSTMLFEAECKGIPVGVVADLGFSKSYANQHFLGSGVLVYFDQIDFTSPKIADPDWLDCYATKKVITTDEFNKLLKQVVPLQHDYQEYLSAGIRYQALANTHAIPTNSFLGIKPCSDA

SEQ ID NO: 664 - protein, 244 aa, Neisseria
MNEKNIKHSQNFITSKHNIDKIMTNIRLNEHDNIFEIGSGKGHFTLELVQRCNFVTAIEIDHKLCKTTENKLVDHDNFQVLNKDILQFKFPKNQSYKIFGNIPYNISTDIIRKIVFDSIADEIYLIVEYGFAKRLLNTKRSLALFLMAEVDISILSMVPREYFHPKPKVNSSLIRLNRKKSRISHKDKQKYNYFVMKWVNKEYKKIFTKNQFNNSLKHAGIDDLNNISFEQFLSLFNSYKLFNK

SEQ ID NO: 665 - protein, 225 aa, Neisseria
MLKKIKKALFQPKKFFQDSMWLTTSPFYLTPPRNNLFVISNLGQLNQVQSLIKIQKLTNNLLVILYTSKNLKMPKLVHQSANKNLFESIYLFELPRSPNNITPKKLLYIYRSYKKILNIIQPAHLYMLSFTGHYSYLISIAKKKNITTHLIDEGTGTYAPLLESFSYHPTKLERYLIGNNLNIKGYIDHFDILHVPFPEYAKKIFNAKKYNRFFAWRKGDVLQGD

SEQ ID NO: 666 - protein, 349 aa, Neisseria
MQNNNEFKIGNRSVGYNHEPLIICEIGINHEGSLKTAFEMVDAAYNAGAEVVKHQTHIVEDEMSDEAKQVIPGNADVSIYEIMERCALNEEDEIKLKEYVESKGMIFISTPFSRAAALRLQRMDIPAYKIGSGECNNYPLIKLVASFGKPIILSTGMNSIESIKKSVEIIREAGVPYALLHCTNIYPTPYEDVRLGGMNDLSEAFPDAIIGLSDHTLDNYACLGAVALGGSILERHFTDRMDRPGPDIVCSMNPDTFKELKQGAHALKLARGGKKDTIIAGEKPTKDFAFASVVADKDIKKGELLSGDNLWVKRPGNGDFSVNEYETLFGKVAACNIRKGAQIKKTDIE

SEQ ID NO: 667 - protein, 228 aa, Neisseria
MEKQNIAVILARQNSKGLPLKNLRKMNGISLLGHTINAAISSKCFDRIIVSTDGGLIAEEAKNFGVEVVLRPAELASDTASSISGVIHALETIGSNSGTVTLLQPTSPLRTGAHIREAFSLFDEKIKGSVVSACPMEHHPLKTLLQINNGEYAPMRHLSDLEQPRQQLPQAFRPNGAIYINDTASLIANNCFFIAPTKLYIMSHQDSIDIDTELDLQQAENILNHKES

SEQ ID NO: 668 - protein, 377 aa, Neisseria
MKRILCITGTRADFGKLKPLLAYIENHPDLELHLIVTGMHMMKTYGRTYKEVTRENYQHTYLFSNQIQGEPMGAVLGNTITFISRLSDEIEPDMVMIHGDRLEALAGAAVGALSSRLVCHIEGGELSGTVDDSIRHSISKLSHIHLVANEQAVTRLVQMGEKRKHIHIIGSPDLDVMASSTLPSLEEVKEYYGLPYENYGISMFHPVTTEAHLMPQYAAQYFKALELSGQNIISIYPNNDTGTESILQELLKYQSDKFIAFPSIRFEYFLVLLKHAKFMVGNSSAGIREAPLYGVPSIDVGTRQSNRHMGKSIIHTDYETKNIFDAIQQACSLGKFEADDTFNGGDTRTSTERFAEVINNPETWNVSAQKRFIDLNL

SEQ ID NO: 669 - protein, 391 aa, Neisseria
MFKVKFYIRHAVLLLCGSLIVGCSAIPSSGPSAKKIVSLGQQSEVQIPEVELIDVNHTVAQLLYKAQINQSFTQFGDGYASAGTLNIGDVLDIMIWEAPPAVLFGGGLSSMGSGSAHQTKLPEQLVTARGTVSVPFVGDISVVGKTPGQVQEIIKGRLKKMANQPQVMVRLVQNNAANVSVIRAGNSVRMPLTAAGERVLDAVAAVGGSTANVQDTNVQLTRGNVVRTVALEDLVANPRQNILLRRGDVVTMITNPYTFTSMGAVGRTQEIGFSARGLSLSEAIGRMGGLQDRRSDARGVFVFRYTPLVELPAERQDKWIAQGYGSEAEIPTVYRVNMADAHSLFSMQRFPVKNKDVLYVSNAPLAEVQKFLSFVFSPVTSGANSINNLTN

SEQ ID NO: 670 - protein, 387 aa, Neisseria
MSEQLPVAVATETKAERKKPKKKSWIKKLSPLFWVTVIIPTVISLVYFGFFASDRFTSQSSFVVRSPKSQSSLNGLGAILQGTGFARAQDDIYTVGEYMRSRSSLDELRKILPVREFYETKGDAFSRFNGFGFRGEEEAFYQYYKNQVMINFDTVSGISTLNVTSFDALESKKINEALLKQGEALINQLNDRARADTVRYAEEVVKTAAERVKEASQNLTDYRIANGVFDLKAQSEVQMGLVSKLQDELIVIQTQLDQVKAVTPENPQIPGLQAREQSLRKEIDQQLRAISGGGHSSLSNQAAEYQRVYLENQLAEQQLAAAMTSLESAKVEADRQQLYLEVISQPSLPDLAHEPKRLYNIVATLIIGLMVYGILSLLTASIREHKN

SEQ ID NO: 671 - protein, 265 aa, Neisseria
MKALHKTSFWESLAIQRRVIGALLMREIITRYGRNNIGFLWLFVEPLLMTFVIVLMWKFLRADRYSTLNIVAFAITGYPMLMMWRNASKRAVGSISSNASLLYHRNVRVLDTILARMILEIAGATIAQIVIMAVLIAIGWIEMPADMFYMLMAWLLMAFFAIGLGLVICSIAFNFEPFGKIWGTLTFVMMPLSGAFFFVHNLPPKVQEYALMIPMVHGTEMFRAGYFGSDVITYENPWYIVLCNLVLLLFGLAMVSKFSKGVEPQ

SEQ ID NO: 672 - protein, 216 aa, Neisseria
MISVEHVSKRYLTRQGWRTVLHDISFKMEKGEKIGILGRNGAGKSTLIRLISGVEPPTTGEIKRTMSISWPLAFSGAFQGSLTGMDNLRFICRIYNVDIDYVKAFTEEFSELGQYLYEPVKRYSSGMKARLAFALSLAVEFDCYLIDEVIAVGDSRFADKCKYELFEKRKDRSIILVSHSHSAMKQYCDNAMVLEKGHMYQFEDMDKAYEYYNSLP

SEQ ID NO: 673 - protein, 757 aa, Neisseria
MNITQILSQELSATAAQITAAVELLDDGATVPFIARYRKEATGGLDDTQLRRLAERLQYLRELEERKAVVLKSIEEQGKLSDDLRAQIEAADNKTALEDLYLPYKPKRRTKAQIAREHGLQPLADVLLAEQSQDVEAAAQGYLNENVPDAKAALDGARAILMEQFAEDAELIGTLRDKLWNEAEIHAQVVEGKETEGEKFSDYFDHREPVRTMPSHRALAVLRGRNEGVLNIALKYQPDDTPITRQSEYEQIIACRFKVSDGHKWLRDTVRLTWRAKIFLSLELEALGRLKEAADTDAITVFARNLKDLLLVAPAGRLTTLGLDPGYRNGVKCAVVDDTGKLLDTVIVYLHQENNMLATLSRLIKQHGVKLIAIGNGTASRETDKIAGELVRGMPEMGLHKIVVSEAGASIYSASELAAREFPDLDVSLRGAVSIARRLQDPLAELVKIDPKSIGVGQYQHDVNQNQLAKSLDAVVEDCVNAVGVDVNTASAPLLARISGLNQTLAQNIVAYRDENGAFDSRKKLLKVPRLGEKTFEQAAGFLRINGGKEPLDASAVHPEAYPVVAKMLAQQGISAAELIGNRERVKQIKASDFTDERFGLPTILDILSELEKPGRDPRGEFQTASFAEGIHEISDLQVGMILEGVVSNVANFGAFVDIGVHQDGLVHISALSNKFVQDPREVVKAGDVVKVKVLEVDAARKRIALTMRLDDEPGGAKHKMPSENRSRERTAGRKPQRNDRAPANSAMADAFAKLKR

SEQ ID NO: 674 - protein, 116 aa, Neisseria
MKMNKQYPKINYIGNKEKIASWICDQLPSDVDTVADVFSGGCSFAYEAKKRGYRVITNDILAINYQIALALIENNHETLNDDDVAMIFSGSPHAGFMSQRYAEKFYFHDEYQQLDL

SEQ ID NO: 675 - protein, 218 aa, Neisseria
MAFTLMRRAMIRKMPYTEDMRPGDTANPYGASKAMVERMLTDIQKADPRWSMILLRYFNPIGAHESGLIGEQPNGIPNNLLPYICQVAAGKLPQLAVFGDDYPTPDGTGMRDYIHVMDLAEGHVAAMQAKSNVAGTHLLNLGSGRASSVLEIIRAFEAASGLTIPYEVKPRRAGDLACFYADPSYTKAQIGWQTQRDLTQMMEDSWRWVSNNPNGYDD

SEQ ID NO: 676 - protein, 355 aa, Neisseria; identical to SEQ ID NO: 661

SEQ ID NO: 677 - protein, 288 aa, Neisseria; identical to SEQ ID NO: 660

SEQ ID NO: 678 - protein, 184 aa, Neisseria
MKDKKMNIIDTAIPDVKLLEPQVFGDARGFFMETFRDEWFKTQVCERTFVQENHSKSGKGVLRGLHYQTENTQGKLVRVVVGEVFDVAVDMRKDSPTFGKWVGEILSAENKRQLWVPEGFAHGFYVLSDEAEFVYKCTDYYNPKAEHSLIWNDPTVGIDWPLQGEPNLSPKDLAGKVLSEAVTF

SEQ ID NO: 679 - protein, 704 aa, Neisseria
MFLFSDGLQSINNNNRRKRIVKNAYIPSRGIRKIPHLSTLLPEFHICKDGKEAEAVVGWGLRPTTHKARAFAAEHQLPFIALEDGFLRSLGLGVAGYPPYSIVYDDIGIYYDTTRPSRLEQLILAADTMPSETLAQAQQAMDFILQHHLSKYNHAPELSDDHPLRSPSKPETVLIIDQTFGDMAIQYGGADASTFELMFQTALNENPQADIWVKTHPDVLCGKKQGYLTQLAQQHRVHLLAEDINPISLLQNVDKVYCVTSQMGFEALLCGKPLTTFGLPWYAGWGVSDDRHPEINRLVQTQRRATRNLLQLFAAAYLQYSRYLNPNTGEAGSLFDVIDYLATVKRKNDKLRGELYCVGMSLWKRAVAKPFFNVPSCRLKFISSTQKLARVKLSDDARILAWGNGKEAIVRFAEQHHIPLLRMEDGFIRSVGLGSNLVPPLSLVTDDMSIYFNAETPSRLEYILQNQNFDDQDFQTALKLQKMLTENHISKYNVGSSDFTAPSTDKTVILVPGQVEDDASIRYGSPQIYRNLDLLRTVRERNPNAYIIYKPHPDVVSGNRIGHISPEDAARYADQTAEQADILTCLQYADEIHTMTSLTGFEALLRGKKVSCYGLPFYAGWGLTQDLLPIPRRSRRLELWQLIAGTLIHYPDYIHPETHQAINAETAAQILIRQKNMQKNNNGLHRGCFAKKLGKIKQLYRSFK

SEQ ID NO: 680 - protein, 419 aa, Neisseria
MKQTVLKNNLQNLLESAENILLLQGPVGDFFLRLADWLTANGKTVHKFNFNAGDDYFYPPTQAHTVVFNDNYDAFPEFLQEYITQHHIQAVVCFGDTRPYHVIAKRIANENQASFWAFEEGYFRPYYITLEKDGVNAFSPLPRRADFFLEQFPKLAQQEYKAPTPVHGGFTPMAKNAIRYYIELFRNPRKYPDYIHHRAPNAGHYLKPWSLSILKRLNYYIEDIQIAKRVEAGKYGKFFIVPLQVFNDSQVRIHCDFPSVRSFLLHVLSSFAEHAPADTNIIIKHHPMDRGFIDYWRDIKRFIKEHPELKGRVIYVHDVPLPVFLRHGLGMVTINSTSGLSGLIHNMPVKVLGRAYYDIPGITDQNTLAEFWNHPTPPDKELFHAYRMYHLNVTQINGNFYSQVFFPNKKTSNSSTPVI

SEQ ID NO: 681 - protein, 404 aa, Neisseria
MEWEFNSYYTLIAATLVLLVGKFLVQKIKFLRDFNIPEPVAGGLIAAIVLFALHEAYGVSFKFEKPLQNAFMLIFFTSIGLSADFSRLKAGGLPLVVFTAIVGGFILVQNFVGVGLATALGLDPLIGLITGSVSLTGGHGTSGAWGPNFETQYGLVGATGLGIASATFGLVFGGLIGGPVARRLINKMGRKPVENKKQDQDDNADDVFEQAKRTRLITAESAVETLAMFAACLAFAEIMDGFDKEYLFDLPKFVWCLFGGVVIRNILTAAFKVNMFDRAIDVFGNASLSLFLAMALLNLKLWELTGLAGPVTVILAVQTVVMVLYATFVTYVFMGRDYDAAVLAAGHCGFGLGATPTAVANMQSVTHTFGASHKAFLIVPMVGAFFVDLINAAILTGFVNFFKG

SEQ ID NO: 682 - protein, 338 aa, Neisseria; identical to SEQ ID NO: 342

SEQ ID NO: 683 - protein, 65 aa, Neisseria
MNTVPKSRIPVKPLPEKTTDEAKVEKWRQLGAEHGLSGEWAVAVRLGENGFTEEQMENIANLFGR

SEQ ID NO: 684 - protein, 466 aa, Neisseria
MTPSALKKTVLLLGTAFAAASVHASGYHFGTQSVNAQSTANAAAAEAADASTIFYNPAGLTKLDSSQISVNANIVLPSIHYEADSATDFTGLPVQGSKSGKITKTTVAPHIYGAYKVNDNLTVGLGVYVPFGSATEYEKDSVLRHNINKLGLTSIAVEPVAAWKLNDRHSFGAGIIAQHTSAELRKYADWGIKSKAEILTAKPPKPNGVAEAAKIQADGHADVKGSDWGFGYQLAWMWDINDRARVGVNYRSKVSHTLKGDAEWAADGAAAKAMWSTMLAANGYTANEKARVKIVTPESLSVHGMYKVSDKADLFGDVTWTRHSRFDKAELVFEKEKTVVKGKSDRTTITPNWRNTYKVGFGGSYQISEPLQLRAGIAFDKSPVRNADYRMNSLPDGNRIWFSAGMKYHIGKNHVVDAAYTHIHINDTSYRTAKASGNDVDSKGASSARFKNHADIIGLQYTYKFK

SEQ ID NO: 685 - protein, 490 aa, Neisseria
MNQTSRDLTRISHNTKIVATLGPGSNNVELLEDMIRVGGLNVVRFNFSHGTPEFHQENALIVREAAKRAGQEIAIIADLQGPKIRVGKIAGGGIELNKGETLVLDAALEGEGTREAVGLDYRDLPDDVAAGDVLWLDDGLLTLTVESVEGSRIITRVENSHVLKSNKGINKRGGGLSAGALTEKDFRDLKTAIAIGCDYLAISFVKSAEDLHIARAKVEEEMKGSTAVRPGLVSKIERVEAIENLDEIILAGDGIMVARGDLAVEVGHAAVPALQKRMIRRARELRRFSITATQMMESMITNPVPTRAEVSDVANAVLDGTDAVMCSAETAVGAYPFETVSQMAIICAAAEKEQDSLNGVAEQVEYPEAVSTNLAVAGGAVSVARAVHAKAIVALTESGSTAFEISRHNITLPIFALTPSVSAQRRMAMYRGVRPLILATSTDHDTALNEVETMLVEHNILHSGDQYIITSGSQMRESGSTNTLEVLRVK

SEQ ID NO: 686 - protein, 78 aa, Neisseria
MKELHTSELVEVSGGKFHIFAQGGGNLGKKDMVAVGKIGASYSPNNSGVEFSVSKQFGYVQGLGVQFSKPTFGISKKW

SEQ ID NO: 687 - protein, 75 aa, Neisseria
MVRFFVLSFLTLINLCSLSACNSHFTGNINPLGTHNKVANPNCANSANSHIRQPSRKNYDPTEYSAWLQYMHDCK

SEQ ID NO: 688 - protein, 28 aa, Neisseria
MSNDENLLFSQPHLTKVNIMQVLTLNEI

SEQ ID NO: 689 - protein, 62 aa, Neisseria
MKKYSDYFKYLIFFLILLPTNYLVSHYVVQTSMSMLSILSSSIITTCLFFVFTNLSQSKKHK

SEQ ID NO: 690 - protein, 50 aa, Neisseria
MSNNHSFFRPEVFVAQRNKWTGPVGWVDAMGAGIFSVAGGYNIGRGMMKP

SEQ ID NO: 691 - protein, 56 aa, Neisseria
MNTETIYATVFCILAATISGLLVKFNVIKIETSINSKFMLLGISILIIGIFLSIFF

SEQ ID NO: 692 - protein, 47 aa, Neisseria
MEWAENETVKLAQKWEQEQKKQQIQQKKETEKSPKHKASRDDWEMER

SEQ ID NO: 693 - protein, 48 aa, Neisseria
MKFVKSGRNPLKKMEKKLNIIKNIQEFMVKFVELALMAISEKSYIVVP

SEQ ID NO: 694 - protein, 172 aa, Neisseria
MWRVLSALPIGVVFFDLIYGFVLNVLQGLDLQRAVPDSEGVLAVTPDIAFNSLQIVANGGMAAVVCFGLAVVFLLNRSVRRRQVLEIGVFRMLGLVAVLAFSAPSVWEWANALPLLLKGADVVNTGNARYVLTALCMPFPAVSCVIGLVGRFRLQTASGRAAKSGGAGKADG

SEQ ID NO: 695 - protein, 164 aa, Neisseria
MDFSCGAASIATLLNNFYGRHYSEAEILDKMDKTQMRASFDDMQRIMPELGFEAQGYALPFEQLVQLKIPVIVYLKYRKNNHFSVLNGINGETVLLADPSLGHVSMSKSQFLSAWKTRDGEMEGKILAIVPKNTDFVRNQMFFNKNPVRQTRFTVEQIQMRQKR

SEQ ID NO: 696 - protein, 224 aa, Neisseria
MLAIYSINILIYNEKSFFRVTLYFVKNFVSFSKPRKSNEMMQKHKCLIDFILTVASQIAYADLPLSLEELLTDKGKFKLESSISYINTERNQSEFANPIYVQTSATKIATVMAMMITPVMAQNLDSQVFDSQNVKAIQLSQAEMKETQGEFVPIIAAAAFGGALGAWGYHGANLYNHGKLGTAQGAATATGIGAATGVAAKQGWLLLPEADWLGIWHGDRVFMH

SEQ ID NO: 697 - protein, 280 aa, Neisseria
MLVCNPYEVVIHGTTSSGKIFRPSDWAERLCGILSSFTKDHRLSYSKWVRPILVDNIRCVAVDKKLETDNPQMFRFLMDFAADNDLRVIDCKALLEEREQGGQNNPADEHVMLAQAIEEKHAAEKAQEQTASGASYVLREIGADDTATAFAALSVLRSALTDINRFTEQINKVQRPQGYRLLGIFEEGKHNAVAVCGFREACTLASGRHIHIDDIVTLPQSRRKGYASRLLEEVRKIGAETGVTKIHLNVHVNHDRADAHRLYFKNGFEICAYHFRCDPK

SEQ ID NO: 698 - protein, 306 aa, Neisseria
MPNPLYRQHIISISDLSREQLECLLQTALKLKAHPRGDLLEGKLIGSCFFEPSTRTRLSFETAVQRLGGKVIGFSDGANTSAKKGETLADTARIISGYTDAIIQRHPKDGAARVAAEFSRVPVINAGDGTNQHPSQTLLDLVTIYETQGRLDKLKIAMAGDLKYGRTVHSLCQALKRWNCEFAFVSPPSLAMPDYITEELDEAGCRYRILGSLEEAAEWADILYMTRVQRERFDEQEFAKIQGKFNLEASMLARAKPNLRVLHPLPRVDEIHPDVDATPHAYYFEQATNGVYARMAILSLVLNEEV

SEQ ID NO: 699 - protein, 152 aa, Neisseria
METPKLSVEAIEKGTVIDHIPAGRGLTILRQFKLLHYGNAVTVGFNLPSKTQGSKDIIKIKGVCLDDKAADRLALFAPEAVVNTIDNFKVVQKRHLNLPDEIAEVFRCPNTNCAGHGEPVKSRFYVKKHNGQTRLKCHYCEKTYSRDSVAEA

SEQ ID NO: 700 - protein, 221 aa, Neisseria
MMMHASVQSRFAPILYVLIFFAGFLTAQIWFNQKAYTEELPPLLSALSAVALVWLAWAFVSARSKAKAEKFYREKMIQNESIHPVLHASLQHLEHKPQILALLVKNHGKGMAEQVRFKAEVLPDDEDARTIAAELAKMDMFALGTDAVASGETYGRVFADIFELSAALEGRAFKGMLKLTAEYKNIFGDACRSETALELGALNQALQEISKTSEKSKRIFY

SEQ ID NO: 701 - protein, 443 aa, Neisseria
MLKCGTFFITRHIPRGCRRFFQPNQARQTEIYQIRGTVMQRRIITLLCAAGMAFSTQTLAANLEVRPNAPERYTVKQGDTLWGISGKYLYSPWQWGRLWDANRDQIHNPDLIYPDQVLVLRHVDGEPRLGLEQTDGIPVVKMSPDKEVSGYGIPAIDVNFYRIFMRHPQIVSRKETAAAPRLLSGPEGRLLYTKGTRVYTKGLKEPGRYLTYRINKNITDPDTGKFLGQEVAFSGIVRSLDYTDSVLEQRSKQAGERPKDNEYHTRTHPLITPLRTPSIQPLVVETAISEIQQGDYLMKMPEDTDRFNMMPHEPSRPVQAKIVSVFEGTRIAGQFQTITIDKGEADGLDKGTVLSLYKRKKTMQVDLSNNFKSRDTVELISTPAEEVGLAMVYRTSEHLSSAIILENISDISVGDTAANPGRDLDNIPDQGRSRVKFGFNRSE

SEQ ID NO: 702 - protein, 167 aa, Neisseria
MALLNILQYPDERLHTVAKPVEQVDERIRKLIADMFETMYESRGIGLAATQVDVHERVVVMDLTEDRSEPRVFINPVIVEKDGETTYEEGCLSVPGIYDTVTRAERVKVEALNEKGEKFTLEADGLLAICVQHELDHLMGIVFVERLSQLKQGRIKTKLKKRQKHTI

SEQ ID NO: 703 - protein, 308 aa, Neisseria
MKVIFAGTPDFAAAALRAVAAAGFEIPLVLTQPDRPKGRGMQLTAPPVKQAALELGLRVEQPEKLRNNAEALQMLKEVEADVMVVAAYGLILPQEVLDTPKHGCLNIHASLLPRWRGAAPIQRAIEAGDAETGVCIMQMDIGLDTGDVVSEHRYAIQPTDTANEVHDALMEIGAAAVVADLQQLQSKGRLNAVKQPEEGVTYAQKLSKEEARIDWSKSAAVIERKIRAFNPVPAAWVEYQGKPMKIRRAEVVAQQGAAGEVLSCSADGLVVACGENALKITELQPAGGRRMNIAAFAAGRHIEAGAKL

SEQ ID NO: 704 - protein, 419 aa, Neisseria
MSMALAQKLAADSIAAVAEGRNLQDVLAQIRTAHPDLMAQENGALQDIAYGCQRYLGSLKHMLAQMLKKPIGNPQLESLLLAALYQLHYTRNAPHAVVNEAVESIAKIGRGQYRSFANAVLRRFLRERDKLVASCKKDDVAKHNLPLWWVAYLKNHYPKHWHNIAAALQSHPPMTLRVNRRHGNAESYLEKLVAEGIAAKALDEYAVTLEEAVPVNRLPGFSDGIVSVQDFGAQQAAYLLNPKDGERILDACAAPGGKTGHILELADCRVTALDIDAGRLKRVEDNIARLGFQTASTACADAQDLSAWYDGKPFDAVLADVPCTASGVARRNPDVKWLRRPTDALKTARQQEALLDALWQVLKSGGRMLIATCSVFVEENDGQLQKFLNRHADAELIESRVLLPNKHQDGFYYALIQKQ

SEQ ID NO: 705 - protein, 180 aa, Neisseria
MLPAFQNVAAEGIDVSRAEARITDGGQLSISSRFQTELPDQLQQALRRGVPLNFTLSWQLSAPIIASYRFKLGQLIGDDDNIDYKLSFHPLTNRYRVTVGAFSTDYDTLDAALRATGAVANWKVLNKGALSGAEAGETKAEIRLTLSTSKLPKPFQINALTSQNWHLDSGWKPLNIIGNK

SEQ ID NO: 706 - protein, 706 aa, Neisseria; identical to SEQ ID NO: 126

SEQ ID NO: 707 - protein, 425 aa, Neisseria
MRSSDILIVDDEIGIRDLLSEILQDEGYSVALAENAEEARKLRHQARPAMVLLDIWMPDCDGITLLKEWAKNGQLNMPVVMMSGHASIDTAVEATKIGAIDFLEKPISLQKLLSAVENALKYGAAQTETGPVFDKLGNSAAIQEMNREVGAAVKCASPVLLTGEAGSPFETVARYFHKNGTPWVSPARVEYLIDMPMELLQKAEGGVLYVGDIAQYSRNIQAGIAFIVGKAEHRRVRVVASGSRAAGSDGIACEEKLAELLSESVVRIPPLRMQHEDIPFLIQGIACNVAESQKIAPASFSEEALAALTRYDWPGNFDQLQSVVATLLLEADGQEIGAGAVSSLLGQNVPAEGAEDMVGGFNFNLPLRELREEVERRYFEYHIAQEGQNMSQVAQKVGLERTHLYRKLKQLGIGVSRRAGEKTEE

SEQ ID NO: 708 - protein, 397 aa, Neisseria
MTEDERFAWLQLAFTPYIGAESFLLLMRRFGSAQNALSAPAEQVAALIRHKQALEAWRNAEKRALARQAAEAALEWEMRDGCRLMLLQDEDFPEMLTQGLTAPPVLFLRGNVQLLHKPSAAIVGSRHATPQAMRIAKDFGKSLGGKGIPVVSGMASGIDTAAHQGALQAEGGTIAVWGTGIDRIYPPVNKNLAYEIAEKGLIVSEFPIGTRPYAGNFPRRNRLIAALSQVTLVVEAALESGSLITARLAAEMGREVMAVPGSIDNPHSKGCHKLIKDGAKLVECLDDILNECPGLLQNTGASSYSINKGIPEKRITAVQTASDQLSLPEGKMPSEKTENRPVGGSILDRMGFDPVHPDVLAGQLAMPAADLYAALLELELDGSVAAMPGGRYQRIRT

SEQ ID NO: 709 - protein, 153 aa, Neisseria
MTEVIAYLIEHFQDFDTCPPPEDLGMLLEEAGFDTMEIGNTLMMMEVLLNSSEFSAEPADSGALRVYSKEETDNLPQEVMGLMQYLIEEKAVSCEQREIIIHALMHIPGDEITVDTAKVLTLLLLWANKSELPVLVGDELMSALLLDNKPTMN

SEQ ID NO: 710 - protein, 768 aa, Neisseria
MAKNLLIVESPSKAKTLKKYLGGDFEILASYGHVRDLVPKSGAVDPDNGFAMKYQLISRNGKHVDAIVAGAKEAENIYLATDPDREGEAISWHLLEILKSKRGLKNIKPQRVVFHEITKNAVLDAVAHPREIEMDLVDAQQARRALDYLVGFNLSPLLWKKIRRGLSAGRVQSPALRLICERENEIRAFEAQEYWTVHLDSHKGRSKFTAKLAQYNGAKLEQFDLPNEAAQADVLKELEGKEAVVTAIEKKKRSRNPAAPFTTSTMQQDAVRKLGFTTDRTMRTAQQLYEGIDVGQGAIGLITYMRTDSVNLADEALTEIRHYIENKIGKEYLPSAAKQYKTKSKNAQEAHEAIRPTSVYRTPESVKPFLSADQFKLYQMIWQRTVACQMTPAKFDQTTVDITVGKGVFRVTGQVQTFAGFLSVYEESSDDEEGEDSKKLPEMSEGDKLPVDKLYGEQHFTTPPPRYNEATLVKALEEYGIGRPSTYASIISTLKDREYVTLEQKRFMPTDTGDIVNKFLTEHFAQYVDYHFTAKLEDQLDEIADGKRQWIPLMDKFWKPFIKQVEEKEGIERAKFTTQELDETCPKCGEHKLQIKFGKMGRFVACAGYPECSYTRNVNETAEEAAERIAKAEAEQAELDGRECPKCGGRLVYKYSRTGSKFIGCVNYPKCKHVEPLEKPKDTGVQCPQCKKGNLVERKSRYGKLFYSCSTYPDCNYATWNPPVAEECLNCHWPVLTIKTTKRWGVEKVCPQKECGWKEQIEPPAPKE

SEQ ID NO: 711 - protein, 231 aa, Neisseria
MMKDLNLSNSLFKGYNDKHGLMICGYEWGWSKADEAAYVAGEYKLPENKIDHTFANKSLYFGEQAKKWRYDNTIKNWFEMWGHPLDENGLGGAFEKSLVQTNWAATQGNTIDNPDKFTQPEHIDNFLYHIEKLRPKVILFMGSRLADFLNNQNVLPRFEQLVGKQTKPLETVQKEFDGTRFNVKFQSFEDCEVVCFPHPSASRGLSYDYIALFAPEMNRILSDFKTTRGFK

SEQ ID NO: 712 - protein, 183 aa, Neisseria
MEFLSLHPWWSFFIILTIILSYIGFCAHLHIQNRAVFFYSYRDVTIIFLTPVILIALSYLIKNKEILSACILCITLIAFSWAWIITYRSNTKRFFLSLLIVWGKLLLSTIVWAILAISLGLAVITGNSKRKKYERRDRHAERNEKAFIGALLVGFELSRNLLNLCCLHKDFSTPSKNIEVNRS

SEQ ID NO: 713 - protein, 125 aa, Neisseria
METHEKIRLMRELNKWSQEDMAEKLAMSAGGYAKIERGETQLNIPRLEQLAQIFKIDMWDLLKSGGGGMVFQINEGDSGGDIALYASGDVSMKIEFLKMELKHCKEMLEQKDKEIELLRKLTETV

SEQ ID NO: 714 - protein, 189 aa, Neisseria
MAAGKHTKHSNRVRIIGGQCRGRKLSFTSADGLRPTPDSVREKLFNWLGQDLTGKTVLDLFGGSGALGIEAASRNAKRVLISDNNRQTVQTLQKNSRELGLGQVQIVFSDGIAYLKTVSEQFDVVFLDPPFAWQDWQILFDALKPCLNPRAFVYLEAGTLPNIPDWLTEYREGKSGQSTFELRVFQVAE

SEQ ID NO: 715 - protein, 83 aa, Neisseria
MSLFITDECINCDVCEPECPNDAISQGEEIYEINPNLCTQCVGHYDEPQCQQVCPVDCILIDEEHPETHDELMAKYEKIIQFK

SEQ ID NO: 716 - protein, 394 aa, Neisseria
MAKEKFERSKPHVNVGTIGHVDHGKTTLTAALTTILAKKFGGAAKAYDQIDNAPEEKARGITINTSHVEYETETRHYAHVDCPGHADYVKNMITGAAQMDGAILVCSAADGPMPQTREHILLARQVGVPYIIVFMNKCDMVDDAELLELVEMEIRDLLSSYDFPGDDCPIVQGSALKALEGDAAYEEKIFELAAALDSYIPTPERAVDKPFLLPIEDVFSISGRGTVVTGRVERGIIHVGDEIEIVGLKETQKTTCTGVEMFRKLLDEGQAGDNVGVLLRGTKREDVERGQVLAKPGTITPHTKFKAEVYVLSKEEGGRHTPFFANYRPQFYFRTTDVTGAVTLEEGVEMVMPGENVTITVELIAPIAMEEGLRFAIREGGRTVGAGVVSSVIA

SEQ ID NO: 717 - protein, 92 aa, Neisseria
MTEHTPEKKNVKVDQLVVQDKESASNSGKEGFFAYFSNSWSEFKKVVWPKREDAVRMTVFVIVFVAVLSIFIYAADTAISWLFFDVLLRREG

SEQ ID NO: 718 - protein, 178 aa, Neisseria
MSKKWYVVQAYSGFEKNVQRILEERIAREEMGDYFGQILVPVEKVVDIRNGRKTISERKSYPGYVLVEMEMTDDSWHLVKSTPRVSGFIGGRANRPTPISQREAEIILQQVQTGIEKPKPKVEFEVGQQVRVNEGPFADFNGVVEEVNYERNKLRVSVQIFGRETPVELEFSQVEKIN

SEQ ID NO: 719 - protein, 144 aa, Neisseria
MAKKIIGYIKLQIPAGKANPSPPVGPALGQRGLNIMEFCKAFNAATQGMEPGLPIPVVITAFADKSFTFVMKTPPASILLKKAAGLQKGSSNPLTNKVGKLTRAQLEEIAKTKDPDLTAADLDAAVRTIAGSARSMGLDVEGVV

SEQ ID NO: 720 - protein, 231 aa, Neisseria
MAKVSKRLKALRSSVEANKLYAIDEAIALVKKAATAKFDESVDVSFNLGVDPRKSDQVIRGSVVLPKGTGKITRVAVFTQGANAEAAKEAGADIVGFEDLAAEIKAGNLNFDVVIASPDAMRIVGQLGTILGPRGLMPNPKVGTVTPNVAEAVKNAKAGQVQYRTDKAGIVHATIGRASFAEADLKENFDALLDAIVKAKPAAAKGQYLKKVAVSSTMGLGIRVDTSSVNN

SEQ ID NO: 721 - protein, 47 aa, Neisseria
MSKTVGIVRFNRNCPTQTVVLKHIARLLVRCLFRLPRWWDIVLVSCL

SEQ ID NO: 722 - protein, 166 aa, Neisseria
MSLNIETKKVAVEEISAAIANAQTLVVAEYRGISVSSMTELRANARKEGVYLRVLKNTLARRAVQGTSFAELADQMVGPLVYAASEDAVAAAKVLHQFAKKDDKIVVKAGSYNGEVMNAAQVAELASIPSREELLSKLLFVMQAPVSGFARGLAALAEKKAGEEAA

SEQ ID NO: 723 - protein, 123 aa, Neisseria
MAITKEDILEAVGSLTVMELNDLVKAFEEKFGVSAAAVAVAGPAGAGAADAEEKTEFDVVLASAGDQKVGVIKVVRAITGLGLKEAKDIVDGAPKTIKEGVSKAEAEDIQKQLEEAGAKVEIK

SEQ ID NO: 724 - protein, 1394 aa, Neisseria
MCMNYSFTEKKRIRKSFAKRENVLEVPFLLATQIDSYAKFLQLENAFDKRTDDGLQAAFNSIFPIVSHNGYARLEFVHYTLGEPLFDIPECQLRGITYAAPLRARIRLVILDKEASKPTVKEVRENEVYMGEIPLMTPSGSFVINGTERVIVSQLHRSPGVFFEHDKGKTHSSGKLLFSARIIPYRGSWLDFEFDPKDLLYFRIDRRRKMPVTILLKALGYNNEQILDIFYDKETFYLSSNGVQTDLVADRLKGETAKVDILDKEGNVLVAKGKRITAKNIRDITNAGLTRLDVEPESLLGKALAADLIDSETGEVLASANDEITEELLAKFDINGVKEITTLYINELDQGAYISNTLRTDETAGRQAARVAIYRMMRPGEPPTEEAVEQLFNRLFFSEDSYDLSRVGRMKFNTRTYEQKLSEAQQNSWYGRLLNETFAGAADKGGYVLSVEDIVASIATLVELRNGHGEVDDIDHLGNRRVRSVGELTENQFRSGLARVERAVKERLNQAESENLMPHDLINAKPVSAAIKEFFGSSQLSQFMDQTNPLSEVTHKRRVSALGPGGLTRERAGFEVRDVHPTHYGRVCPIETPEGPNIGLINSLSVYARTNDYGFLETPYRRVIDGKVTEEIDYLSAIEEGRYVIAQANADLDSDGNLIGDLVTCREKGETIMATPDRVQYMDVATGQVVSVAASLIPFLEHDDANRALMGANMQRQAVPCLRPEKPMVGTGIERSVAVDSATAIVARRGGVVEYVDANRVVIRVHDDEATAGEVGVDIYNLVKFTRSNQSTNINQRPAVKAGDVLQRGDLVADGASTDFGELALGQNMTIAFMPWNGYNYEDSILISEKVAADDRYTSIHIEELNVVARDTKLGAEDITRDIPNLSERMQNRLDESGIVYIGAEVEAGDVLVGKVTPKGETQLTPEEKLLRAIFGEKASDVKDTSLRMPTGMSGTVIDVQVFTREGIQRDKRAQSIIDSELKRYRLDLNDQLRIFDNDAFDRIERMIVGQKANGGPMKLAKGSEITTEYLAGLPSRHDWFDIRLTDEDLAKQLELIKVSLQQKREEADELYEIKKKKLTQGDELQPGVQKMVKVFIAIKRRLQAGDKMAGRHGNKGVVSRILPVEDMPYMADGRPVDIVLNPLGVPSRMNIGQILEVHLGWAAKGIGERIDRMLKEQRKAGELREFLNRLYNGSGKKEDLDALTDEEIIELASNLRKGASFASPVFDGAKESEIREMLNLAYPSDDPEVEKLGFNDSKTQITLYDGRSGEAFDRKVTVGVMHYLKLHHLVDEKMHARSTGPYSLVTQQPLGGKAQFGGQRFGEMEVWALEAYGAAYTLQEMLTVKSDDVNGRTKMYENIVKGEHKIDAGMPESFNVLVKEIRSLGLDIDLERY

SEQ ID NO: 725 - protein, 1391 aa, Neisseria
MNLLNLFNPLQTAGMEEEFDAIKIGIASPETIRSWSYGEVKKPETINYRTFKPERDGLFCAKIFGPVKDYECLCGKYKRLKFKGVTCEKCGVEVTLSKVRRERMGHIELAAPVAHIWFLKSLPSRLGMVLDMTLRDIERVLYFEAFVVTDPGMTPLQRRQLLTEDDYYNKLDEYGDDFDAKMGAEGIRELLRTLNVAGEIEILRQELESTGSDTKIKKIAKRLKVLEAFHRSGMKLEWMIMDVLPVLPPDLRPLVPLDGGRFATSDLNDLYRRVINRNNRLKRLLELHAPDIIVRNEKRMLQEAVDSLLDNGRRGKAMTGANKRPLKSLADMIKGKGGRFRQNLLGKRVDYSGRSVITVGPYLRLHQCGLPKKMALELFKPFIFHKLEKQGLASTVKAAKKLVEQEVPEVWDILEEVIREHPIMLNRAPTLHRLGIQAFEPILIEGKAIQLHPLVCAAFNADFDGDQMAVHVPLSLEAQMEARTLMLASNNVLSPANGEPIIVPSQDIVLGLYYMTRDRINAKGEGSLFADVKEVHRAYHTKQVELGTKITVRLREWVKNEAGEFEPVVNRYETTVGRALLSEILPKGLPFEYVNKALKKKEISKLINASFRLCGLRDTVIFADHLMYTGFGFAAKGGISIAVDDMEIPKEKAALLAEANAEVKEIEDQYRQGLVTNGERYNKVVDIWGRAGDKIAKAMMDNLSKQKVIDRAGNEVDQESFNSIYMMADSGARGSAAQIKQLSGMRGLMAKPDGSIIETPITSNFREGLTVLQYFIATHGARKGLADTALKTANSGYLTRRLVDVTQDLVVVEDDCGTSDGFVMKAVVQGGDVIEALRDRILGRVTASDVVDPSSGETLVEAGTLLTEKLVDMIDQSGVDEVKVRTPITCKTRHGLCAHCYGRDLARGKLVNAGEAVGVIAAQSIGEPGTQLTMRTFHIGGAASRAAAASQVEAKSNGTARFSSQMRYVANNKGELVVIGRSCEVVIHDDIGRERERHKVPYGAILLVQDGMAIKAGQTLATWDPHTRPMITEHAGMVKFENVEEGVTVAKQTDDVTGLSTLVVIDGKRRSSSASKLLRPTVKLLDENGVEICIPGTSTPVSMAFPVGAVITVREGQEIGKGDVLARIPQASSKTRDITGGLPRVAELFEARVPKDAGMLAEITGTVSFGKETKGKQRLIVTDVDGVAYETLISKEKQILVHDGQVVNRGETIVDGAVDPHDILRLQGIEALARYIVQEVQEVYRLQGVKISDKHIEVIIRQMLRRVNIADAGETGFITGEQVERGDVMAANEKALEEGKEPARYENVLLGITKASLSTDSFISAASFQETTRVLTEAAIMGKQDELRGLKENVIVGRLIPAGTGLTYHRSRHQQWQEVEQETAETQVTDE

SEQ ID NO: 726 - protein, 85 aa, Neisseria
MKPRNLFFAGCLLTSATFAEDIGVPVELINVGNRIAMPSEGESLALLPFAEDVPPVRDAMPSEVPKSAAGGDVRGDRMRMPINIG

SEQ ID NO: 727 - protein, 49 aa, Neisseria
MSAALWHKKLSWKGFTPQINFRYNKINSNMPAFYSRSGKERFVSIEKTY

SEQ ID NO: 728 - protein, 123 aa, Neisseria
MPTINQLVRKGRQKPVYVNKVPALEACPQKRGVCTRVYTTTPKKPNSALRKVCKVRLTNGFEVISYIGGEGHNLQEHSVVLIRGGRVKDLPGVRYHTVRGSLDTAGVKDRKQARSKYGAKRPK

SEQ ID NO: 729 - protein, 156 aa, Neisseria
MPRRREVPKRDVLPDPKFGSVELTKFMNVLMIDGKKSVAERIVYGALEQIEKKTGKVAIEVFNEAIANAKPIVEVKSRRVGGANYQVPVEVRPSRRLALAMRWVRDAARKRGEKSMDLRLAGELIDASEGRGGALKKREEVHRMAEANKAFSHFRF

SEQ ID NO: 730 - protein, 701 aa, Neisseria
MARKTPISLYRNIGISAHIDAGKTTTTERILFYTGLTHKLGEVHDGAATTDYMEQEQERGITITSAAVTSYWSGMAKQFPEHRFNIIDTPGHVDFTVEVERSMRVLDGAVMVYCAVGGVQPQSETVWRQANKYQVPRLAFVNKMDRQGANFFRVVEQMKTRLRANPVPIVIPVGAEDNFSGVVDLLKMKSIIWNEVDKGTTFTYGDIPAELVETAEEWRQNMIEAAAEASEELMDKYLGGDELTEEEIVGALRQRTLAGEIQPMLCGSAFKNKGVQRMLDAVVELLPAPTDIPPVQGVNPNTEEADSRQASDEEKFSALAFKMLNDKYVGQLTFIRVYSGVVKSGDTVLNSVKGTRERIGRLVQMTAADRTEIEEVRAGDIAAAIGLKDVTTGETLCAESAPIILERMEFPEPVIHIAVEPKTKADQEKMGIALNRLAKEDPSFRVRTDEESGQTIISGMGELHLEIIVDRMKREFGVEANIGAPQVAYRETIRKAVKAEYKHAKQSGGKGQYGHVVIEMEPMEPGGEGYEFIDEIKGGVIPREFIPSVDKGIRDTLPNGIVAGYPVVDVRIRLVFGSYHDVDSSQLAFELAASQAFKEGMRQASPALLEPIMAVEVETPEEYMGDVMGDLNRRRGVVLGMDDDGIGGKKVRAEVPLAEMFGYSTDLRSATQGRATYSMEFKKYSEAPAHIAAAVTEARKG

SEQ ID NO: 731 - protein, 394 aa, Neisseria
MAKEKFERSKPHVNVGTIGHVDHGKTTLTAALTTILSKKFGGAAKAYDQIDNAPEEKARGITINTSHVEYETETRHYAHVDCPGHADYVKNMITGAAQMDGAILVCSAADGPMPQTREHILLARQVGVPYIIVFMNKCDMVDDAELLELVEMEIRDLLSSYDFPGDDCPIVQGSALKALEGDAAYEEKIFELAAALDSYIPTPERAVDKPFLLPIEDVFSISGRGTVVTGRVERGIIHVGDEIEIVGLKETQKTTCTGVEMFRKLLDEGQAGDNVGVLLRGTKREDVERGQVLAKPGTITPHTKFKAEVYVLSKEEGGRHTPFFANYRPQFYFRTTDVTGAVTLEEGVEMVMPGENVTITVELIAPIAMEEGLRFAIREGGRTVGAGVVSSVIA

SEQ ID NO: 732 - protein, 103 aa, Neisseria
MANQKIRIRLKAYDYALIDRSAQEIVETAKRTGAVVKGPIPLPTKIERFNILRSPHVNKTSREQLEIRTHLRLMDIVDWTDKTTDALMKLDLPAGVDVEIKVQ

SEQ ID NO: 733 - protein, 121 aa, Neisseria
MIAKHIDRFPLLKLDRVIDWQPIEQYLNRQRTRYLRDHRGRPAYPLLSMFKAVLLGQWHSLSDPELEHSLITRIDFNLFCRFDELSIPDYSHQPYSGLSEKDAYAVMTGYRPVKRVRPYAV

SEQ ID NO: 734 - protein, 214 aa, Neisseria
MTLGLVGRKVGMTRVFDEQGVSVPVTVLDMSANRVTQVKSKDTDGYTAVQVTFGQKKANRVNKAEAGHFAKAGVEAGRGLIEFALTEEKLAELKAGDEITVSMFEVGQLVDVTGTSKGKGFSGTIKRHNFGAQRTSHGNSRSHRVPGSIGMAQDPGRVFPGKRMAGQYGNTKATVQKLEVVRVDAERQLLLVKGAVPGAVNSDVVVRPSVKVGA

SEQ ID NO: 735 - protein, 206 aa, Neisseria
MELKVIDAKGQVSGSLSVSDALFAREYNEALVHQLVNAYLANARSGNRAQKTRAEVKHSTKKPWRQKGTGRARSGMTSSPLWRKGGRAFPNKPDENFTQKVNRKMYRAGMATILSQLTRDERLFAIEALTAETPKTKVFAEQVKNLGLEQVLFVTKQLDENVYLASRNLPNVLVLEAQQVDPYSLLRYKKVIITKDAVAQLEEQWV

SEQ ID NO: 736 - protein, 104 aa, Neisseria
MNQQRLTQVILAPIVSEKSNVLAEKRNQMTFKVLANATKPEIKAAVELLFGVQVADVTTVTIKGKVKRFGRTLGRRSDVKKAYVSLAAGQELDLEAAAAAADKE

SEQ ID NO: 737 - protein, 277 aa, Neisseria
MAIVKMKPTSAGRRGMVRVVTEGLYKGAPYAPLLEKKNSTAGRNNNGHITTRHKGGGHKHHYRVVDFKRNKDGIPAKVERIEYDPNRTAFIALLCYADGERRYIIAPRGIQAGAVLVSGAEAAIKVGNTLPIRNIPVGTTIHCIEMKPGKGAQIARSAGASAVLLAKEGAYAQVRLRSGEVRKINVDCRATIGEVGNEEQSLKKIGKAGANRWRGIRPTVRGVVMNPVDHPHGGGEGRTGEAREPVSPWGTPAKGYRTRNNKRTDNMIVRRRYSNKG

SEQ ID NO: 738 - protein, 92 aa, Neisseria
MARSLKKGPYVDLHLLKKVDAARASNDKRPIKTWSRRSTILPDFIGLTIAVHNGRTHVPVFISDNMVGHKLGEFSLTRTFKGHLADKKAKKK

SEQ ID NO: 739 - protein, 109 aa, Neisseria
MRVNAQHKNARISAQKARLVADLIRGKDVAQALNILAFSPKKGAELIKKVLESAIANAEHNNGADIDELKVVTIFVDKGPSLKRFQARAKGRGNRIEKQTCHINVTVGN

SEQ ID NO: 740 - protein, 230 aa, Neisseria
MGQKINPTGFRLAVTKDWASKWFAKSTDFSTVLKQDIDVRNYLRQKLANASVGRVVIERPAKSARITIHSARPGVVIGKKGEDIEVLKRDLQVLMGVPVHVNIEEIRRPELDAQIIADGIAQQLEKRVQFRRAMKRAMQNAMRSGAKGIKIMTSGRLNGADIARSEWYREGRVPLHTLRANVDYATSEAHTTYGVLGLKVWVYTEGNIKSSKPEHESKQRKAGRRNAAAN

SEQ ID NO: 741 - protein, 138 aa, Neisseria
MLQPTRLKYRKQQKGRNTGIATRGNKVSFGEFGLKAVGRGRLTARQIEAARRAMTRHIKRGGRIWIRVFPDKPITEKPIQVRMGGGKGNVEYYIAEIKPGKVLYEMDGVPEELAREAFELAAAKLPIPTTFVVRQVGQ

SEQ ID NO: 742 - protein, 63 aa, Neisseria
MKANELKDKSVEQLNADLLDLLKAQFGLRMQNATGQLGKPSELKRVRRDIARIKTVLTEKGAK

SEQ ID NO: 743 - protein, 87 aa, Neisseria
MSETKNVRTLQGKVVSDKMDKTVTVLVERKVKHPLYGKIIRLSTKIHAHDENNQYGIGDVVVISESRPLSKTKSWVVSELVEKARSI

SEQ ID NO: 744 - protein, 122 aa, Neisseria
MIQMQTILDVADNSGARRVMCIKVLGGSKRRYASVGDIIKVAVKDAAPRGRVKKGDVYNAVVVRTAKGVRRPDGALIKFDNNAAVLLNNKLEPLGTRIFGPVTRELRTERFMKIVSLAPEVL

SEQ ID NO: 745 - protein, 107 aa, Neisseria
MNKIIKGDRVVVIAGKDKGKQGQVVRVLGDKVVVEGVNVVKRHQKPNPMRGIEGGIITKEMPLDISNIAILNPETNKADRVGIKLIENEGKVKRVRFFKSNGSIIGA

SEQ ID NO: 746 - protein, 179 aa, Neisseria
MARLREFYKETVVPELVKQFGYKSVMEVPRIEKITLNMGVGEAVADKKVMEHAVSDLEKIAGQKPVVTVARKSIAGFKIRDNYPVGCKVTLRRDQMFEFLDRLITIALPRVRDFRGVSGKSFDGRGNYNMGVREQIIFPEIEYDKIDALRGLNITITTTAKTDEEAKALLSLFKFPFKG

SEQ ID NO: 747 - protein, 101 aa, Neisseria
MAKKALINRDLKRQALAKKYAAKRAAIKAVINDSNATEEERFEARLRFQSIPRNAAPVRQRRRCALTGRPRGTFRKFGLGRIKIREIAMRGEIPGVVKASW

SEQ ID NO: 748 - protein, 130 aa, Neisseria
MSMHDPISDMLTRIRNAQRANKAAVAMPSSKLKCAIAKVLKEEGYIEDFAVSSDVKSILEIQLKYYAGRPVIEQIKRVSRPGLRIYKASSEIPSVMNGLGIAIVSTSKGVMTDRKARSQGVGGELLCIVA

SEQ ID NO: 749 - protein, 177 aa, Neisseria
MSRVAKNPVTVPAGVEVKFGAEALVIKGKNGELSFPLHSDVAIEFNDGKLTFVANNSSKQANAMSGTARALVSNMVKGVSEGFEKRLQLIGVGYRAQAQGKILNLSLGFSHPIVYEMPEGVSVQTPSQTEIVLTGSDKQVVGQVAAEIRAFRAPEPYKGKGVRYVGEVVVMKEAKKK

SEQ ID NO: 750 - protein, 117 aa, Neisseria
MDKHTTRLRRARKTRARIADLKMVRLCVFRSNNHIYAQVISAEGDKVLAQASTLEAEVRGSLKSGSNVEAAAIVGKRIAEKAKAAGVEKVAFDRSGFQYHGRVKALAEAARENGLSF

SEQ ID NO: 751 - protein, 172 aa, Neisseria
MAKHEIEERGDGLIEKMVAVNRVTKVVKGGRIMAFSALTVVGDGDGRIGMGKGKSKEVPVAVQKAMDQARRSMIKVPLKNGTIHHEVIGRHGATKVFMQPAKEGSGVKAGGPMRLVFDAMGIHNISAKVHGSTNPYNIVRATLDGLSKLHTPADIAAKRGLTVEDILGVNHG

SEQ ID NO: 752 - protein, 61 aa, Neisseria
MAEQKKIRVTLVKSLIGTIESHRACARGLGLRRREHTVEVLDTPENRGMINKISYLLKVES

SEQ ID NO: 753 - protein, 144 aa, Neisseria
MFLNTIQPAVGATHAGRRVGRGIGSGLGKTGGRGHKGQKSRSGGFHKVGFEGGQMPLQRRLPKRGFKSLTASANAQLRLSELESIAVNEIDILVLKQAGLIASTVSNVKVIASGEISKAVALKGIKVTKGARAAIEAVGGKIEM

SEQ ID NO: 754 - protein, 436 aa, Neisseria
MANQQTSSGSSKFGDLKKRLLFLFGALIVFRIGAHIPVPGVDAVALAKLYESAGNGILGILNMFSGGSLERFSIFAIGIMPYISASIIVQLASEILPSLKALKKEGEAGRKVITKYTRYGTVLLAILQSLGVASFVFQQGIVVTSSFEFHVSTVVSLVTGTMFLMWLGEQITERGIGNGISLIITAGIASGIPSGIAKLVTLTNQGSMSMLTALFIVFGALLLIYLVVYFESAQRKIPIHYAKRQFNGRAGSQNTHMPFKLNMAGVIPPIFASSIILFPSTLLGWFGSADTNSVLHKIAGLLQHGQLLYMALFAATVIFFCYFYTALVFSPKEMAENLKKSGAFVPGIRPGEQTSRYLEKVVLRLTLFGALYITTICLIPEFLTTVLNVPFYLGGTSLLILVVVTMDFSTQINSYRLTQQYDKLMTRSEMKSFSRK

SEQ ID NO: 755 - protein, 72 aa, Neisseria
MAKEDTIQMQGEILETLPNATFKVKLENDHIVLGHISGKMRMHYIRISPGDKVTVELTPYDLTRARIVFRAR

SEQ ID NO: 756 - protein, 37 aa, Neisseria
MRVQPSVKKICRNCKIIRRNRVVRVICTDLRHKQRQG

SEQ ID NO: 757 - protein, 120 aa, Neisseria
MARIAGVNIPNNAHIVIGLQAIYGIGATRAKLICEAANIAPDTKAKDLDETQLDALRDQVAKYEVEGDLRREVTMSIKRLMDMGCYRGFRHRRGLPCRGQRTRTNARTRKGPRKAIAGKK

SEQ ID NO: 758 - protein, 131 aa, Neisseria
MAKANTASRVRKKVRKTVSEGIVHVHASFNNTIITITDRQGNALSWATSGGAGFKGSRKSTPFAAQVAAEAAGKVAQEYGVKNLEVRIKGPGPGRESSVRALNALGFKITSITDVTPLPHNGCRPPKKRRI

SEQ ID NO: 759 - protein, 206 aa, Neisseria
MARYIGPKCKLARREGTDLFLKSARRSLDSKCKIDSAPGQHGAKKPRLSDYGLQLREKQKIRRIYGVLERQFRRYFAEADRRKGSTGELLLQLLESRLDNVVYRMGFGSTRAEARQLVSHKAIVVNGQVVNIPSFQVKAGDVVSVREKAKKQVRIQEALGLATQIGLPGWVSVDADKLEGVFKNMPDRSELTGDINEQLVVEFYSK

SEQ ID NO: 760 - protein, 328 aa, Neisseria
MQNSTTEFLKPRQIDVNTFSATRAKVSMQPFERGFGHTLGNALRRILLSSMNGFAPTEVAIAGVLHEYSTVDGIQEDVVDILLNIKGIVFKLHGRSQVQLVLKKSGSGVVSAGDIELPHDVEILNPGHVICHLADNGQIEMEIKVEQGRGYQSVSGRQVVRDENRQIGAIQLDASFSPISRVSFEVEPARVEQRTDLDKLVLDIETDGSIDPEEAVRSAARILIDQMSIFADLQGTPVEEVEEKAPPIDPVLLRPVDDLELTVRSANCLKAEDIYYIGDLIQRTETELLKTPNLGRKSLNEIKEVLASKGLTLGSKLEAWPPVGLEKP

SEQ ID NO: 761 - protein, 122 aa, Neisseria
MRHRNGNRKLNRTSSHRAAMLRNMANSLLTHEAIVTTLPKAKELRRVVEPLITLGKKPSLANRRLAFDRTRDRDVVVKLFGDLGPRFTARNGGYVRVLKYGFRKGDNAPLALVELVDKPAAE

SEQ ID NO: 762 - protein, 237 aa, Neisseria
MMVYIMNAFDIKSTKMDVLSISLHTSDLFDLEDVLVKLGKKFQESGVVPFVLDVQEFDYPESLDLAALVSLFSRHGMQILGLKHSNERWAAAAMKYHLLFCLSHSENVKELGQVEVQKTEDGQKARKTVLITSPVRTGQQVYAEDGDLIVTGAVSQGAELIADGNIHIYAPMRGRALAGAKGDTSARIFIHSMQAELVSVAGIYRNFEQDLPNHLHKQPVQILLQDNRLVISAIGSE

SEQ ID NO: 763 - protein, 271 aa, Neisseria
MAKIIVVTSGKGGVGKTTTSASIATGLALRGYKTAVIDFDVGLRNLDLIMGCERRVVYDLINVIQGEATLNQALIKDKNCENLFILPASQTRDKDALTREGVEKVMQELSGKKMGFEYIICDSPAGIEQGALMALYFADEAIVTTNPEVSSVRDSDRILGILQSKSHKAEQGGSVKEHLLITRYSPERVAKGEMLSVQDICDILHIPLLGVIPESQNVLQASNSGEPVIHQDSVAASEAYKDVIARLLGENREMRFLEAEKKSFFKRLFGG

SEQ ID NO: 764 - protein, 87 aa, Neisseria
MSLIEFLFGRKQKTATVARDRLQIIIAQERAQEGQAPDYLPTLRKELMEVLSKYVNVSLDNIRISQEKQDGMDVLELNITLPEQKKV

SEQ ID NO: 765 - protein, 306 aa, Neisseria
MTLTELRYIVAVAQERHFGRAARRCFVSQPTLSIAIKKLEEELAVSLFDRSSNDIITTEAGERIVAQARKVLEEAELIRHLANEEQNELEGAFKLGLIFTVAPYLLPKLIVSLRRTAPKMPLMLEENYTHTLTESLKRGDVDAIIVAEPFQEPGIVTEPLYDEPFFVIVPKGHSFEELDAVSPRMLGEEQVLLLTEGNCMRDQVLSSCSELAAKQRIQGLTNTLQGSSINTIRHMVASGLAISVLPATALTENDHMLFSIIPFEGTPPSRRVVLAYRRNFVRPKALSAMKAAIMQSQLHGVSFICD

SEQ ID NO: 766 - protein, 945 aa, Neisseria
MLDKYNPAEIESKHYQNWEEQGYFQPDMDLTKPSFSIQLPPPNVTGTLHMGHAFNQTIMDGLTRYYRMKGCNTAWIPGTDHAGIATQIVVERQLAAQNVSRHDLGREKFLEKVWEWKEVSGGTITQQMRRVGCSADWTREYFTMDDVRAETVTEVFVRLYEQGLIYRGKRLVNWDPVLGTAVSDLEVESVEEQGSMWHIRYPLADNPAEAVIVATTRPETLLGDVAVAVNPEDERYTHLIGKELILPLTGRTIPVIADEYVEKDFGTGCVKITPAHDFNDYEVGKRHDTRLINVFNLEAKVLANAEVFNFKGEAQLGFALPEKYAGLDRFAARKQMVADLQEQGFLVEIKPHTLMTPKGDRTGSVIEPMLTSQWFVAMSATPNGGEPDSEFKGLSLADKAKKAVDSGAVRFIPENWVNTYNQWMNNIQDWCISRQLWWGHQIPAWYDNEGNVYVARNQEEAEKQAGKTGLTREEDVLDTWFSSALVPFSTLGWPSETDELKAFLPSNVLVTGYEIIFFWVARMIMMTTHFTGKVPFKDVYIHGIVRDHEGKKMSKSEGNVIDPVDLIDGIGLEKLLVKRTTGLRKPETAPKVEEATKKLFPEGIPSMGADALRFTMASYASLGRSVNFDFKRAEGYRNFCNKIWNATNFVLMNTENQDCGYGATAAEPRGYSFPDMWIVGRLNQTIEQVTQAYETYRFDLAAETLYSFVWNDYCDWYLELAKVQLQTGCASRQRATRHTLLRVLEAALRLLHPIIPFITEELWQTVAPMCDAKTADSIMLARFPEADSGEIVQTAFEQMTVLQDLIGAVRNLRGEMGIQPNVKAPLFVESTDDLADYLKYLPMMTRLTEAQQVAALPESEDAPVAVCNGARLMLKVEIDKAAETARLSKEAEKLQKALDKLNAKLSKPGYTEKAPAHLVEKDKADLAELEDKMAKVQNQLAKLKD

SEQ ID NO: 767 - protein, 269 aa, Neisseria
MPDFSMSNLAVAFSITLAAGLFTVLGSGLVMFSKTPNPRVLSFGLAFAGGAMVYVSLTEIFSKSSEAFAEIYDKDHAFAAATMAFLAGMGGIALIDRLVPNPHETLDAQDPSFQESKRRHIARVGMMAAFAITAHNFPEGLATFFATLENPAVGMPLALAIAIHNIPEGISIAAPVYFATRSRKKTVWACLLSGLAEPLGAALGYLVLQPFLSPAVFGSVFGVIAGVMVFLALDELLPAAKRYSDGHETVYGLTTGMAVIAVSLVLFHF

SEQ ID NO: 768 - protein, 418 aa, Neisseria
MKVLVLGAGVAGVSSAWYLAEAGHEVTVIDRAEGVAMETSFANAGQLSYGYTTPWAAPGIPTKALKWLFKSHPPLLFRPDGSLYQIEWLWQMLQNCTAAHYQTNKERMVRISEYSREMFRRFEAQTGMNFEGRKKGTLQIFRQTKEVEAAKQDIAVLERYGVPYRRLKPEECAEFEPALARVTAKIAGGLHLPADATGDCRLFTENLYKLCQEKGVRFHFNQNISRIDHNGLRIKTVETETGRFEADAVVCALGCFSRTVLAQLDLNLPIYPVKGYSLTLPVTNSDGAPVSTVLDESYKVAITRFDNRIRVGGMAELSGYEIKLPEKRRETLALVVNDLFPEGGDLSQASFWSGLRPMTPDSTPLIGRTRFDNLFLNTGHGTLGWTMSLGSAKLTADIVSGKDTEIRSDDLSLSRYQA

SEQ ID NO: 769 - protein, 463 aa, Neisseria
MQVFLDNPKAFFETVSGWVWGPLMLMLLVGTGILLTVLLKGLQFTMLGYALKQAFMPPKKHKSGEGHEGDISHFAALMTALSATIGTGNIAGVATAVVTGGPGAVFWMWMTAIFGMATKYGEGVLAVKYRVNNSKGEMSGGPMYYIEKGLGKNWKWMAVAFALFGTFASFGIGSSVQSNSVAQAVQTSFGIEPAYTGITLTVLTAVVVLGGIKGIAKAASFIVPAMAVFYVLGGLSIIAINSDALMPAVKLIFSDAFSAQAVAGGAIGTVIRYGVARGVFSNEAGMGSAPIAAAAAKTDHPVRQALVSMTGTFLDTIVVCSITGIVLVMGLLGAGGEFVKPEVSGAALTTVTFQKMLPGIGGWIVTIGLIFFAYSTILGWCYYGEKCAVYVFGEKFAGLYRVGYVSSVMLGTVLSLDLVWLASDTFNGLMALPNLIALLLMAKVIVNETRDFKQKITNGELPH

SEQ ID NO: 770 - protein, 258 aa, Neisseria
MTLIHPTAVIDPKAELDSGVKVGAYTVIGPNVQIGANTEIGPHAVINGHTSIGENNRIFQFASLGEIPQDKKYRDEPTKLIIGNGNTIREFTTFNLGTVTGIGETRIGDDNWIMAYCHLAHDCVIGNHTIFANNASLAGHVTIGDYVVLGGYTLVFQFCRIGDYAMTAFAAGVHKDVPPYFMASGYRAEPAGLNSEGMRRNGFTAEQISAVKDVYKTLYHRGIPFEEAKADILRRAETQAELAVFRDFFAQSARGIIR

SEQ ID NO: 771 - protein, 149 aa, Neisseria
MDVQLPIEAKDIQKLIPHRYPFLQLDRITAFEPMKTLTAIKNVTINEPQFQGHFPDLPVMPGVLIIEAMAQACGTLAILSEGGRKENEFFFFAGIDEARFKRQVIPGDQLVFEVELLTSRRGIGKFNAVAKVDGQVAVEAIIMCAKRVV

SEQ ID NO: 772 - protein, 348 aa, Neisseria
MIPATYTLSQITARLGGEWRGEDISVTAVRPLADAQAEHISFLANPKYKAEVHDSSAGAVIVSAKAADGFEGRNLIVADDPYLYFAKVARLFSPVVKARGGIHPTAVVEPGATVPTSCEIGANVYIGANTVLGEGCRILANAVVQHDCKLGDEVVLHPNAVVYYGCTLGRRVEIHSGAVIGADGFGLAFADDSWFKIPQTGAVTLGDDVEIGSNTNIDRGAMSDTTVGNGTKIDNQVQIGHNCKIGSHTVIAAKTGISGSVTIGSYCIIGGGVGTVGHIEIADKTTIGGGTSVTHSITESGKHLAGIFPMSTHKEWARNAVYIHRLSEMNKRLKTLEQQLSDAGQDSK

SEQ ID NO: 773 - protein, 166 aa, Neisseria
MTRLTRAFAAALIGLCCTAGAHADTFQKIGFINTERIYLESKQARKIQKTLDSEFSARQDELQKLQREGLDLERQLAEGKLRNAKKAQAEEKWRGLVAAFRKKQAQFEEDYNLRRNEEFASLQQNANRVIVKIAKQEGYDVILQNVIYVNTQYDVTDSVIKEMNAR

SEQ ID NO: 774 - protein, 797 aa, Neisseria
MKLKQIASALMMLGISPLALADFTIQDIRVEGLQRTEPSTVFNYLPVKVGDTYNDTHGSAIIKSLYATGFFDDVRVETADGQLLLTVIERPTIGSLNITGAKMLQNDAIKKNLESFGLAQSQYFNQATLNQAVAGLKEEYLGRGKLNIQITPKVTKLARNRVDIDITIDEGKSAKITDIEFEGNQVYSDRKLMRQMSLTEGGIWTWLTRSNQFNEQKFAQDMEKVTDFYQNNGYFDFRILDTDIQTNEDKTKQTIKITVHEGGRFRWGKVSIEGDTNEVPKAELEKLLTMKPGKWYERQQMTAVLGEIQNRMGSAGYAYSEISVQPLPNAETKTVDFVLHIEPGRKIYVNEIHITGNNKTRDEVVRRELRQMESAPYDTSKLQRSKERVELLGYFDNVQFDAVPLAGTPDKVDLNMSLTERSTGSLDLSAGWVQDTGLVMSAGVSQDNLFGTGKSAALRASRSKTTLNGSLSFTDPYFTADGVSLGYDVYGKAFDPRKASTSIKQYKTTTAGAGIRMSVPVTEYDRVNFGLVAEHLTVNTYNKAPKHYADFIKKYGKTDGTDGSFKGWLYKGTVGWGRNKTDSALWPTRGYLTGVNAEIALPGSKLQYYSATHNQTWFFPLSKTFTLMLGGEVGIAGGYGRTKEIPFFENFYGGGLGSVRGYESGTLGPKVYDEYGEKISYGGNKKANVSAELLFPMPGAKDARTVRLSLFADAGSVWDGKTYDDNSSSATGGRVQNIYGAGNTHKSTFTNELRYSAGGAVTWLSPLGPMKFSYAYPLKKKPEDEIQRFQFQLGTTF

SEQ ID NO: 775 - protein, 446 aa, Neisseria
MHTLLAFIFAILILVSLHEFGHYIVARLCGVKVVRFSVGFGKPFFTRKRGDTEWCLAPIPLGGYVKMVDTREGEVSEADLPYAFDKQHPAKRIAIVAAGPLTNLALAVLLYGLSFSFGVTELRPYVGTVEPDTIAARAGFQSGDKIQSVNGTPVADWGSAQTEIVLNLEAGKVAVGVQTASGAQTVRTIDAAGTPEAGKIAKNQGYIGLMPFKITTVAGGVEKGSPAEKAGLKPGDRLTAADGKPIASWQEWANLTRQSPGKKITLNYERAGQTHTADIRPDTVEQSDHTLIGRVGLRPQPDRAWDAQIRRSYRPSVVRAFGMGWEKTVSHSWTTLKFFGKLISGNASVSHISGPLTIADIAGQSAELGLQSYLEFLALVSISLGVLNLLPVPVLDGGHLVFYTAEWIRGKPLGERVQNIGLRFGLALMMLMMAVAFFNDVTRLLG

SEQ ID NO: 776 - protein, 394 aa, Neisseria
MTPQVLTILGSTGSIGESTLDVVSRHPEKFRVFALAGHKQVEKLAAQCQTFHPEYAVVADAEHAARLEALLKRDGTATQVLHGAQALVDVASADEVSGVMCAIVGAVGLPSALAAAQKGKTIYLANKETLVVSGALFMETARANGAAVLPVDSEHNAVFQVLPRDYAGRLNEHGIASIILTASGGPFLTADLNTFDRITPAQAVKHPNWRMGRKISVDSATMMNKGLELIEAHWLFNCPPDKLEVVIHPQSVIHSMVRYRDGSVLAQLGNPDMRTPIAYCLGLPERIDSGVGDLDFDALSALTFQKPDFDRFPCLRLAYEAMNAGGAAPCVLNAANEAAVAAFLDGQIKFTDIAKTVAHCLAQDFSDGIGDIGGLLAQDARTRAQARAFIGTLR

SEQ ID NO: 777 - protein, 265 aa, Neisseria
MLKQRVITAMWLLPLMLGMLFYAPQWLWAAFCGLIALIALWEYARMGGLCKIKTNHYLAATLVFGVVAYAGGWMLPNLVWYVVLAFWLAVMPLWLRFKWRLNGGWQVYAVGWLLVMPFWFALVSLRPHPDDALPLLAVMGLVWVADICAYFSGKAFGKHKIAPAISPGKSWEGAIGGAVCVAVYMTAVRSAGWLAFDTGWFDTVLIGLVLTVVSVCGDLLESWLKRAAGIKDSSKLLPGHGGVFDRTDSLIAVISVYAAMMSVLN

SEQ ID NO: 778 - protein, 248 aa, Neisseria
MKSSTQAVLEHTAIPKHIAVIMDGNGRWAKKRFLPRIMGHKRGLDALENMVKHCAKLGVQYLTVFAFSTENWRRPEDEVSFLMGLFLQALQKQVRRLHENNMRLKILGSRERFNRQILQGIEEAEALTANNTGLTLSIAADYGGRWDILQAANKLIAEGVSEITEDTLAKHLMLGDAPEPDLFIRTGGETRISNFLLWQMAYAELYFTDILWPDFDGKALDDAVASFQKRERRFGRTSEQLPIEQQRN

SEQ ID NO: 779 - protein, 185 aa, Neisseria
MINDIQKTAEGKMQRSVEVLKENLAKVRTGRAHTGLLDQVEVEYWGSMVPVSQVANVTLLDARTIGVKPFEGNMAAKVEKAIRDSNLGLNPAAVGDLIRVPMPMLTEERRKDLIKVVRGEAEEGRVSIRNVRRDANDHIKKLLKDKEISEDEARRGEEAVQKLTDKYITEADKLLTAKEEDLMAI

SEQ ID NO: 780 - protein, 375 aa, Neisseria; identical to SEQ ID NO: 316

SEQ ID NO: 781 - protein, 140 aa, Neisseria
MFVNEKYPYAALFAGLVFLTLPFALAVHDAFALAFGRTGLLVSVSDGGFGWRGGWDGTVWFVFGVFAFLNVVVSAGLTKLAYKKMMRRHSRYTLFLSGVAACAAAAVAWIFELLLGSGALGGLRGRRCWNMRLPCGWWRC

SEQ ID NO: 782 - protein, 207 aa, Neisseria
MERKERLRAGIAAMGLDISETAQDRLLVYVDLLKKWNKTYNLTALRDEEKMIVHHLLDSLTLLPHIEGVQTMLDVGSGGGQPGIPAAVCRPDVQITLLDANTKKTAFLQQAVIELGLDNVRVVSGRVEAVSDVRADVVTSRAFAELADFVSWTVHLLKDGGYWAAMKGVYPQEEIGRLPQDVCVEKVQRLDVPGLDAERHIVILSKR

SEQ ID NO: 783 - protein, 257 aa, Neisseria
MSANILAIANQKGGVGKTTTTVNLAASLASRGKRVLVVDLDPQGNATTGSGIDKAGLQSGVYQVLLGDADVQSAAVRSKEGGYAVLGANRALAGAEIELVQEIAREVRLKNALKAVEEDYDFILIDCPPSLTLLTLNGLVAAGGVIVPMLCEYYALEGISDLIATVRKIRQAVNPDLDITGIVRTMYDSRSRLVAEVSEQLRSHFGDLLFETVIPRNIRLAEAPSHGMPVMAYDAQAKGTKAYLALADELAARVSGK

SEQ ID NO: 784 - protein, 194 aa, Neisseria
MHILTAGVDEAGRGPLVGSVFAAAVILPETFDLPGLTDSKKLSEKKRDALAEMIKNQAVEWHVAAASPEEIASLNILHATMLAMKRAVDGLAVRPEKIFIDGNRIPEHLNIPAEAVVKGDSKIIEISAASVLAKTARDAEMYALAQRHPQYGFDKHKGYGTKQHLEALEKYGVLPEHRRDFAPVRNLLAQQALF

SEQ ID NO: 785 - protein, 631 aa, Neisseria
MTHMIYPKTYDVIVVGGGHAGTEAALAAARMGAQTLLLSHNIETLGQMSCNPSIGGIGKGHLVRELDALGGAMALATDKSGIQFRRLNASKGAAVRATRAQADRILYKAAIREMLENQENLDLFQQAVEDVTLDGERISGVITAMGVEFKARAVVLTAGTFLSGKIHIGLENYEGGRAGDPAAKSLGGRLRELKLPQGRLKTGTPPRIDGRTIDFSQLTEQPGDTPVPVMSVRGNADMHPRQVSCWITHTNTQTHDIIRSGFDRSPMFTGKIEGVGPRYCPSIEDKINRFADKDSHQIFLEPEGLTTHEYYPNGISTSLPFDIQIALVRSMKGLENAHILRPGYAIEYDYFDPRNLKASLETKTIAGLFFAGQINGTTGYEEAAAQGLLAGANAVQYVRGQDPLLLRREQAYLGVLVDDLITKGVNEPYRMFTSRAEYRLQLREDNADMRLTEDGYKIGLVSEAQWRMFNEKREAVEREIQRLKTTWYTPQKLAEGEQIRVFGQKLSREANLHDLLRRPNLDYAALMTLEGAMPSENLSAEVIEQVEIQVKYQGYIDRQNEEIDSRRDIETLKLPDGIDYGKVKGLSAEVQQKLNQHKPETVGQASRISGVTPAAVALLMVHLKRGFKDAK

SEQ ID NO: 786 - protein, 475 aa, Neisseria
MNENFTEWLHGWVGAINDPMWSYLVYMLLGTGLFFTVTTGFVQFRLFGRSIKEMLGGRKQGDDPHGITPFQAFVTGLASRVGVGNIAGVAIAIKVGGPGAVFWMWVTALIGMSSAFVESSLAQLFKVRDYDNHHFRGGPAYYITQGLGQKWLGVLFALSLIFCFGFVFEAVQTNTIADTVKAAWGWEPHYVGVALVILTAPIIFGGIRRISKAAEIVVPLMAVLYLFIALFIILTNIPMIPDVFGQIFSGAFKFDAAAGGLLGGLISQTMMMGIKRGLYSNEAGMGSAPNAAAAAEVKHPVSQGMIQMLGVFVDTIIVCSCTAFIILIYQQPYGDLSGAALTQAAIVSQVGQWGAGFLAVILFMFAFSTVIGNYAYAESNVQFIKSHWLITAVFRMLVLAWVYFGAVANVPLVWDMADMAMGIMAWINLVAILLLSPLAFMLLRDYTAKLKMGKDPEFKLSEHPGLKRRIKSDVW

SEQ ID NO: 787 - protein, 335 aa, Neisseria
MFGANTMKQPVFAVTSGEPAGIGPDICLDLAFARLPCRCAVLGDKNLLRARAEALGKSVVLRDFDPESGGAAYGELEVLHIPAVEAVEAGKLNPANAAYVLQLLDTALAGISDGIFDGIVTAPLHKGIINDARASTGFFSGHTEYLAEKSGTGQVVMMLAGKGLRVALVTTHLPLKDVAAAITQPLIESVARILHHDLKHKFGIKNPKILVAGLNPHAGEGGHLGHEETDTIIPALENLRREGINLAGPYPADTLFQPFMLEGADAVLAMYHDQGLPVLKYHSFGQGVNITLGLPFIRTSVDHGTALDLAATGRADSGSLITAVETAVEMARGSL

SEQ ID NO: 788 - protein, 919 aa, Neisseria
MKRMLFNATQAEELRVAIVDGQNLLDLDIETLGKEQRKGNIYKGIITRIEPSLEACFVDYGTDRHGFLPFKEVSRSYFQDYEGGRARIQDVLKEGMEVIVQVEKDERGNKGAALTTFISLAGRYLVLMPNNPRGGGVSRRIEGEERQELKAAMAELDIPNGMSIIARTAGIGRSAEELEWDLNYLKQLWQAIEEAGKAHHDPYLLFMESSLLIRAIRDYFRPDIGEILVDNQEVYDQVAEFMSYVMPGNIGRLKLYEDHTPLFSRFQIEHQIESAFSRSVSLPSGGAIVIDHTEALVSIDVNSARATRGADIEDTAFKTNMEAAEEVARQMRLRDLGGLVVIDFIDMENPKHQRDVENVLRDALKKDRARVQMGKLSRFGLLELSRQRLKPALGESSHVACPRCAGTGVIRGIESTALHVLRIIQEEAMKDNTGEVRAQVPVDVATFLLNEKRAELFAMEERLDVNVVLIPNIHLENPHYEINRIRTDDVEEDGEPSYKRVAEPEEDESAKPFGGEKAKAARPEPAVKGVRHTSPAPTAAPEKKTSWWDSFKAWLKRIFGGSETQAAPAAETSEKRSTANRSGSRANNRRQNPRRSKREGSKVEVREVAGKTAGQEARADKAETRNNGNRRRNERGDRAAERANEAEIQSRNVQPAATVADAAPSETEVQTGKRRRNGSRSERGQTAPETATVAETTVQTAENTPSEPHTAEDKGSKPKSERNRRERDSRDAKERRERNNQRDRRQNGKKRNIPSAAKIEQYLNIHDTADKVRSAAAHVFGETDANAPITVSIADPVAERDLPTASPAVSNGDAPVYDAAEKIRRATAAILPEGATPKAEAQEMPSETATFTAAAEQARETAQTGGLVLIETDPAALKAWAAQPEVQAGRGLRRSEQPKPSEVATVPAEEMIQVETRQG

SEQ ID NO: 789 - protein, 95 aa, Neisseria
MHVPENRVRKGRIQKAIKIDAAVCLPRSERCGRKNGGRLLLVIVMPVFWAVCVWDLGPAAVLLPRRNGKINSNLITFCACRLGTGAGKMLCGVRF

SEQ ID NO: 790 - protein, 330 aa, Neisseria
MKTHEISKDSVSLIGVAEHEAGQRLDNYLIKILKGVPKSHIHRIIRAGEVRLNKKRCKPDSRIAEGDTVRIPPVRVAEKEMPSERRAAVPARAFDVVYEDDALLVIDKPSGVAVHGGSGVSFGVIEQLRRARPEAKYLELVHRLDKDTSGLLMVAKKRSALVKLHEAIRNDHPKKIYLALGVGKLPDDNFHVKLPLFKYTGAQGEKMVRVSADGQSAHTVFRVLSRFSDGILHGVGLSHLTLVRATLKTGRTHQIRVHLQSQGCPIAGDERYGDYQANRRLQKLGLKRMFLHASELHLNHPLTGEPLVLKAELPPDLAQFAVMLENGTKM

SEQ ID NO: 791 - protein, 390 aa, Neisseria
MWGQTNMADKKSPLIAVSVGEASGDLLGAHLIRAIRKRCPQARFTGIGGELMKAEGFESLYDQERLAVRGFVEVVRRLPEILRIRRGLVRDLLSLKPDVFVGIDAPDFNLGVAEKLKRSGIPTVHYVSPSVWAWRRERVGKIVHQVNRVLCLFPMEPQLYLDAGGRAEFVGHPMAQLMPLEDDRETARQTLGVDAGIPVFALLPGSRVSEIDYMAPVFFQTALLLLERYPAARFLLPAATEATKRRLAEVLQRPEFAGLPLTVIDRQSETVCRAADAVLVTSGTATLEVALCKRPMVISYKISPLTYAYVKRKIKVPHVGLPNILLGKEAVPELLQSEAKPEKLAAALADWYEHPDKVAALQQDFRALHLLLKKDTADLAARAVLEEAGC

SEQ ID NO: 792 - protein, 129 aa, Neisseria
MNVKIKYNLLEYCEYLGGIFGVYKNYLNMDIKDPNLKIRFFDFLEELLSDGVIELCDYRENPPKILTGSPKTQVDELRRIWPDMEEMLLYFPDNPWFYVEHFWWGATCPIELTQLPKIEIYEEQMKQGK

SEQ ID NO: 793 - protein, 136 aa, Neisseria
MTTYTIPKKDYQFLYIYEGTLLNYTLKNDEFHIIVQNVDYPDFPQEIPTPNYTDWVKIKFKQFSYLKFIYGYATKNQDKNIKNVLELGELKQDDEILDYGGALEVIGSRYDLPTGFSIDIVCREIELEFLDQESFN

SEQ ID NO: 794 - protein, 57 aa, Neisseria
MLSRQLYRISFSVETPPLGHLSFGAVESDFIWEGRNPFRIRATHRATLYVSSCVLKH

SEQ ID NO: 795 - protein, 269 aa, Neisseria
MTPLKIAIAGANGRMGRVLVEAVNNHPDTVLSGALEHSGSEALGLDAGYAVGLKTGIAISDDVDAVLAQSDVLIDFTRPEPTLKHLQKCVEKQVNIIIGTTGFDDTGKAAIHTAAEKTGIVFAANFSVGVNLTFHILDTVARVLNEGYDIEIIEGHHRHKVDAPSGTALRMGEVIAGALGRDLKQCAVYGREGHTGPRDPSTIGFATVRAGDIVGDHTALFATDGERVEITHKASSRMTFAAGAVRAAVWVNGKTGLYDMQDVLGLNNR

SEQ ID NO: 796 - protein, 125 aa, Neisseria
MNKTLILALSALLGLAACSAERVSLFPSYKLKIIQGNELEPRAVAALRPGMTKDQVLLLLGSPILRDAFHTDRWDYTFNTSRNGIIKERSNLTVYFENGVLVRTEGDVLQNAAEALKDRQNTDKP

SEQ ID NO: 797 - protein, 144 aa, Neisseria
MEKFNNIAQLKDSGLKVTGPRLKILDLFETHAEEHLSAEDVYRILLEEGVEIGVATIYRVLTQFEQAGILQRHHFETGKAVYELDKGDHHDHIVCVKCGEVTEFHNPEIEALQDKIAEENGYRIVDHALYMYGVCSDCQAKGKR

SEQ ID NO: 798 - protein, 241 aa, Neisseria
MRIPLLAPDNYAFPDPAYALARCDGLVGVSGDLDAGRLLEAYRNGVFPWFSRDGWFFWYAVGPRAVVFPDRLHIPRSLAKTLRNGSYRVAVNGCFAEVVAHCAAAARPNQDGTWIAPEFQTAYLKLHEMGYAHSFECHYPDESGETRLAGGFYGVQIGRVFYGESMFALQPDASKIAFACAVPFLADLGVELIDCQQDTEHMRRFGSELLPFADFAERLRMLNAVPLKEEIGRREVACKGL

SEQ ID NO: 799 - protein, 343 aa, Neisseria
MGIKVAINGYGRIGRQVLRAIYDYQIQDQLQIVAVNASGSLETNAHLTKFDTVHGRFEADVSHDGGNLIVNGDKIPFFSTRNPAELPWKELGVDLVMECTGAFTSKEKAKIHLESGAKKVLISAPGGDDVDATVVYGVNDSVLTADMTVVSNASCTTNCLSPVAKVLSESVGIVKGAMTTIHALTNDQTVTDVRHKDLRRARSGVENMIPTKTGAAKAVGLVLPELKGRLDGLAIRVPTVNVSLVDLSFQAARDTTVEEINALMKAASEAGPLKGVLGYNTLPLVSMDFNHTTEASHFDATLTKVVDGNMVKVFAWYDNEWGFSCQMLNTARRMFGLEVRPLK

SEQ ID NO: 800 - protein, 279 aa, Neisseria
MTATAAAIDRLLPQTQCRECGYDGCLPYAQAVATGEAYNLCAPGGETVIRDISALLGKPFVAPAKTQAKALARIDETACIGCTACIRACPADAIMGAGKLMHTVIADECTGCGLCVAPCPVDCIHMQPVADTVLPRARRFSLSADSRFAAAEHARTRYLKRNERKQREADERKAMLAEREAAVRNARPQTPDTPKKPTFNPADLIAKAMAKAQTQQDRLAAADNRKDYQAKQIAEARERAELRRAQRDMKYGSDSEKAAALEYLKQYKAKQEAAQNTAS

SEQ ID NO: 801 - protein, 658 aa, Neisseria
MNEFSLAPIVIVLLVSVITVILCRKFNIPSMLGYLLVGFLAGPGMLSLIPKSHATDYLGEIGIVFLMFSIGLEFSLPKLRAMRRLVFGLGGLQVGITMLSVMGILMLTGVPFNWAFAVSGALAMSSTAIVSRILSEKTELGQPHGQMAMGVLLMQDIAVVPLMILIPALAGGGDGNIWAALGLAFAKMLLTLGLLFFVGSKIMSRWFRMVAKRKSSELFMINVLLVTLGVAYLTELEGLSMALGAFVAGMLLSETEYRFQVEDDIRPFRDILLGFFFITVGMKLDIQALIGGWRQVLMLLAMLLVLKALVVFAIAFKMKHSVGDSLKTALYLAQGGEFGFVMLAIAGQLDMVSPEWEQAATAAVLLSMIIAPFLLGGSDALVGRLVKSSWDMKSLDLHSMLVETMSKSDHVLIVGFGRGGQTVGRVLAQEDIPYFALDLDIARVQVARSAGEPVSFGDAKRREVLEAAGLGRAKMVVVTLNNMHETQHVLDNVLSMYPNMPVYVRATNDDYVKTFTDIGAEEAVSDTKETGLVLAGYAMLGNGASYRHVYQTMANIRHSRYAALEGLFVGSDDEAGFGENGETVRHAFPLAAEAYAVGKTVGTLPMAAYGIKLLFVRRRTGRIENPDASFTLEGGDVLVVAGKKEEIISFENWSLQGI

SEQ ID NO: 802 - protein, 461 aa, Neisseria
MISIFDIFKIGIGPSSSHTVGPMKAAAAFAAGLDAQAVRIVIDIYGSLALTGYGHGTFDALMLGLEGSLPHDIPLAGIPERLERIRTQHILRLNGQEIRFIPDRDLNILGNQVLPKHPNSLRFTAYASDGTVLNEQVYYSVGGGFVVTEEDFDRQAETEKAVPYPYTSCAELLARCRLNRLDISEVVLANEAALAGCGEAEIRRRAAAVAEVMEGCIKRGLGADGELPSGLNVRRRAPQLAAKLKVLRETEIVNTQLWPMVYAMAVNEENAAGGRVVTAPTNGAAGIIPAVLHYFRKFNPHATQERVENFLLTAGAIGILYKTNASISGADVGCQGEVGVACSMAAGAYAEVIGGTPKQVENAAEMAMEHHLGLTCDPVGGLVQIPCIERNGIAAEKALKLGTLALLEDGTDKKVSLDEVIRTMLQTGRDMKATYKETSLAGLAATLRKKAVPVSVRVVEC

SEQ ID NO: 803 - protein, 796 aa, Neisseria
MTEQKHEEYGADSIQVLEGLEAVRKRPGMYIGDTQDGSGLHHMVFEVLDNAIDEALAGHCDKITVTIHADHSVSVADNGRGMPTGIHPKEGRSAAEVIMTVLHAGGKFDNNSYKISGGLHGVGVSVVNALSDWVTLTIYRDGKEHFVRFVRGETEEPLKIVGDSDKKGTTVRFLASTETFGNVEYSFDILAKRIRELSFLNNGVDIELTDERDGKHESFALSGGVAGFVQYMNRKKTPLHEKIFYAFGEKDGMSVECAMQWNDSYQESVQCFTNNIPQRDGGTHLTALRQVMTRTINNYIEANEVAKKAKVETAGDDMREGLTCVLSVKLPDPKFSSQTKDKLVSGEIGPVVNEVISQALTDFLEENPNEAKIITGKIVDAARAREAARKAREITRRKGVMDGLGLPGKLADCQEKDPALSELYLVEGDSAGGSAMQGRDRKFQAILPLKGKILNVEKARFEKMLASQEVATLITALGAGIGKEEFNAEKLRYHRIIIMTDADVDGAHIRTLLLTFFYRQMPELVERGYIYIAQPPLYKAKYGKQERYLKDELEKDQWLLGLALEKAKIISDGRTIEGAELADTAKQFLLAKTVIEQESRFVDELVLRAMLHASPIDLTSSENADKAVAELSGLLDEKEVALERIEGHEGHRFIKITRKLHGNVMVSYIEPKFLNSKAYQTLTQTAAALKGMVGEGAKLYKGENGYDADSFETALDILMSVAQKGMSIQRYKGLGEMNPEQLWETTMDPAVRRLLKVRIEDAIAADEVFVTLMGDEVEPRRAFIENNALIAQNIDA

SEQ ID NO: 804 - protein, 328 aa, Neisseria
MKRYVCLRHQVGDCPVKWQKRFFATKIYTLYFSDRGAEMEIWNMLDTWLGAVPIRAEAVESVAAVAALLLARALLLNIHFKRHPDFGIESKRRFLVASRNITLLLVLFSLAFIWSAQIQTLALSMFAVAAAVVVATKELIMCLSGSILRSATQQYSVGDYIEINGLRGRVVDINLLNTLMMQVGPNPLVGQLAGTTVSFPNSLLLSHPVRRDNILGDYVIHTVEIPVPIHLDSDEAVCRLKAVLEPLCAPYIPAIQRHLENVQAEKLFITPAARPRVTRVPYDDKAYRIIVRFASPVSKRLEIQQAVMDEFLRVQYRLLNHPAGSETL

SEQ ID NO: 805 - protein, 678 aa, Neisseria
MTDNALLHLGEEPRFDQIKTEDIKPALQTAIAEAREQIAAIKAQTHTGWANTVEPLTGITERVGRIWGVVSHLNSVADTPELRAVYNELMPEITVFFTEIGQDIELYNRFKTIKNSPEFDTLSPAQKTKLNHDLRDFVLSGAELPPEQQAELAKLQTEGAQLSAKFSQNVLDATDAFGIYFDDAAPLAGIPEDALAMFAAAAQSESKTGYKIGLQIPHYLAVIQYADNRELREQIYRAYVTRASELSDDGKFDNTANIDRTLANALQTAKLLGFKNYAELSLATKMADTPEQVLNFLHDLARRAKPYAEKDLAEVKAFARESLNLADLQPWDLGYASEKLREAKYAFSETEVKKYFPVGKVLNGLFAQIKKLYGIGFTEKTVPVWHKDVRYFELQQNGETIGGVYMDLYAREGKRGGAWMNDYKGRRRFSDGTLQLPTAYLVCNFAPPVGGREARLSHDEILILFHETGHGLHHLLTQVDELGVSGINGVEWDAVELPSQFMENFVWEYNVLAQMSAHEETGVPLPKELFDKMLAAKNFQRGMFLVRQMEFALFDMMIYSEDDEGRLKNWQQVLDSVRKKVAVIQPPEYNRFALSFGHIFAGGYSAGYYSYAWAEVLSADAYAAFEESDDVAATGKRFWQEILAVGGSRSAAESFKAFRGREPSIDALLRHSGFDNAV

SEQ ID NO: 806 - protein, 188 aa, Neisseria
MGFYALLLIALGMSMDAFAVALAKGAAVRMPPRKIAATALVFGTVEALTPLAGWVGGFYAKPFISEWDHWVAFVLLGGLGLKMMREGLSGEAEDVRESKRESLWMTVLTAFGTSIDSMIVGVGLAFMEVNIAFAAAIIGMATTVMVAVGLTAGRALGVLFGRCAEFAGGLVLIAIGTWTLLSHLGLIQ

SEQ ID NO: 807 - protein, 504 aa, Neisseria
MTTSKCPVTHLTMNNGAPVADNQNSLTAGPRGPLLAQDLWLNEKLADFVREVIPERRMHAKGSGAFGTFTVTHDITKYTRAKIFSEVGKKTEMFARFTTVAGERGAADAERDIRGFALKFYTEEGNWDVVGNNTPVFFLRDPRKFPDLNKAVKRDPRTNMRSATNNWDFWTLLPEALHQVTIVMSDRGIPAGYRHMHGFGSHTYSFWNEAGERFWVKFHFRTQQGIKNLTNEEAAKIIADDRESHQRDLYEAIERGEFPKWTMYIQVMPEADAEKVPYHPFDLTKVWPKKDYPLIEVGEFELNRNPENFFADVEQSAFAPSNLVPGVGASPDKMLQARLFNYADAQRYRLGVNFRQIPVNRPRCPVHSNQRDGQGRADGNYGSLPHYEPNSFGQWQQQPDFAEPPLKINGDAAHWDYRQDDDDYFSQPRALFNLMNDAQKQALFGNTAAAMGDAPDFIKYRHIRNCYRCDPAYGEGVAKALGLTVEDAQAARATDPALGQAGLL

SEQ ID NO: 808 - protein, 283 aa, Neisseria
MTLLGIKLKQTQQLNQRLQQSLRVLQMSGIELEREVENWLSDNPLLERKDTDEFSDAEFSHYTAPARQIGGDEGEDMLSNIAGEQDFKQYLHAQVCEHPLSDQEAACVHILIDFLDEQGYLTDSIEDILDHTPLEWMLDEAMLQHALTALKKFDPAGVAAADLNESLILQIERLGECAAKPAALHIVRNALDSIDGNRSQTLARIKKHLPQTDSGTLEAALDLIASLNPFPAAGFASSTPTPYSDEALANLLAFRGMEVSRRTIAKYRESFEIPAAHKRKTAE

SEQ ID NO: 809 - protein, 376 aa, Neisseria
MKIVFITTVASSIYGFRAPVIKKLIGKNHQVYAFVSEFSDNELDIIREMGVTPVTYRSNRSGLNPFSDIKSTFLIFKELKKISPDLVFPYFAKPVIFGTFAAKLAGVPRIVGMLEGLGFAFTPQPEGIPLKTKIIKGILIALYRIALPMLESLIVLNPDDKDELTDKYGIKIKNIHILGGIGLDLRQYPYSEADIPDEKEPVKFLFIGRFLKEKGIDDFIRAAEQVKDKYPDTVFTALGAIDKSRGGGGDLERLAARDIIRFPGFVNNVSEVIKEHHIFVLPSYYREGVPRSTQEAMAVGRAVITTDVPGCRETVADKVNGFLIEPWNPRILAEKMIYFIENREAVRLMGNASYAIAKDKFDAEKVDLKLLDILKA

SEQ ID NO: 810 - protein, 415 aa, Neisseria
MSQRRVVITGLGQVSPVGNTVAEAWDTLLTGKSGIGAITRFDTSDINSRVAGEVRGFDIGQYISAKEARRMDVFIHYGIAAALQAIADSGLDDVENLDKDRIGVNIGSGIGGLPGIEVTGKAVIEGGARKINPFFIPGSLINLISGHVTILKGYRGPSYGMVSACTTGAHAIGDSLRMIKYGDADIMVAGGAEGAISTLGVGGFAAMKALSTRNDDPATASRPWDKGRDGFVIGEGAGILVLEELEHAKKRGAKIYAEIVGFGMSSDAYHITAPNEEGPALAVTRALKDAGINPEDVDYVNAHGTSTPLGDANETKALKRAFGEHAYKTVVSSTKSMTGHLLGAAGGVEAVYSILAIHDGKIPPTINIFEQDVEAGCDLDYCANEARDAEIDVAISNSFGFGGTNGTLVFKRFKG

SEQ ID NO: 811 - protein, 78 aa, Neisseria
MSNIEQQVKKIVAEQLGVNEADVKNESSFQDDLGADSLDTVELVMALEEAFGCEIPDEDAEKITTVQLAIDYINAHNG

SEQ ID NO: 812 - protein, 335 aa, Neisseria
MYPLARRILFALDAEKAHHFTLDALYTVYKLGLIPVTDNRTKPVKLMGMDLPNPVGLAAGLDKNGEYIDALGALGFGFIEIGTVTPNPQPGNPQPRLFRVPEHQGIINRMGFNNHGIDTMIRNIEKSKFSGVLGINIGKNAVTPIENAADDYLICLEKAYAHASYITVNISSPNTKNLRALQGGDELSALLEALKNKQAQLASVHGKYVPLAVKIAPDLDEAQIEDIAHVVKSVEMDGIIATNTTIDKSSLGSHPLAGEQGGLSGLPVHEKSNRVLKLLADHIDGKLPIIGVGGIMEGEDSADKIRLGATAVQVYSGLIYKGPALVKECLKALAR

SEQ ID NO: 813 - protein, 157 aa, Neisseria
MNLDLTAQKVRLSWKDILWGYGNKYLGWADVAAYARKMTLSDHDERVFKLSLINKSNILELKPVLEDLASEMRDYSPKNWLYVLLSDVFHRKEEFEDPLGEVEKIYADFDYPEEIESFVRYMPPKDGYIPSAHTYEENIARLYSHWEHYLNNGGGQG

SEQ ID NO: 814 - protein, 72 aa, Neisseria
MIMGFWNGVAKAAKAVGEGMIEAGNEHKALKMEYAEKSSEELHEIVKSDGFFKNSTREKSAAYAILKERGEV

SEQ ID NO: 815 - protein, 896 aa, Neisseria
MSDNRLDTARRHSLFLARQLDNGKLKPEIFLPMLDKVLTEADFQAFADWGEIRAEENEEELARQLRELRRYVVSQIIVRDINRISDLNEVTRTITLFADFAVNTALDFAYAYYRDMYGTPIGRYTKSPQHLSVVAMGKAGGYELNVSSDIDLIFVYPESGDTDGRRERGNQEFFTKVGQKLIALLNDITADGQVFRVDMRLRPDGDSGALVLSETALEQYLITQGREWERYAWCKGRVVTPYPNDIKALVRPFVFRKYLDYGAYEAMRKLHRQISSEVSKKGMADNIKLGAGGIREVEFIAQIFQMIRGGQMRALQLKGTQETLKKLAELGIMLSEHVETLLAAYRFLRDVEHRLQYWDDQQTQTLPTSPEQRQLLAESMGFDSYSAFSDGLNVHRNKVNQLFNEILSEPEEQTQDNSEWQWAWQDKPDEEGRRCRLKAHGFDAETVAARLDQIRHGHKYRHLSAHAQPRFDAVVPLFVQAAAAQSNPTDTLMRLLDFLENISRRSAYLAFLNEHPQTLAQLAQIMGQSSWVAAYLNKYPILLDELISAQLLDTAFDWQALAAALSDDLKACGGDTEAQMDTLRRFQHAQVFRLAVQDLAGLWTVESLSDQLSALADTILAAALLCAWADMPKKHRDTPQFAVVGYGKLGGKELGYASDLDLVYLYDDPHPDAGDVYSRLARRLTNWLSAATGAGSLYETDLRLRPNGDAGFLAHSIAAFEKYQRENAWTWEHQSLTRARFICGTSEIQTAFDRIRTEILTAERDQTALAGEIIEMREKMFPTHPPADSNVKYARGGVVDVEFIVQYLILAHARQYPQLLDNYGNIALLNISADCGLIDKTLAGQSRTAYRFYRRQQHNTKLRDAAKTEVTGELLAHYGNVRKLWREVFGEEAATV

SEQ ID NO: 816 - protein, 321 aa, Neisseria
MSYTQLTQGERYHIQYLSRHCTVTEIAKQLNRHKSTISREIRRHRTQGQQYSAEKAQRQSQTIKQRKRQPYKLDSQLIQHIDTLIRRKLSPEQVCAYLCKHHQITLHHSTIYRYLRQDKSNGSTLWQHLRICSKPYRKRYGSTWTRGKVPNRVGIENRPAIVDQKSRIGDWEADTIVGKGQKSALLTLVERVTRYTIICKLDSLKAEDTARAAVRALKAHKDRVHTITMDNGKEFYQHTKITKALKAETYFCRPYHSWEKGLNENTNGLIRQYFPKQTDFRNISDREIRRVQDELNHRPRKTLGYETPSVLFLNLFQPLIH

SEQ ID NO: 817 - protein, 230 aa, Neisseria
MKRFTYTLSDGLCIEIELKRSAKKNLILRPVNMQTVSINVPPFFQDHALANWLAANETILRNTLAKTPVHPVSHPNLPEWIWYRGIKTKLDTHSQSHIRITSSEILLPRKETAAQIDHLRRLLNERAREYLLPRLEKHAAETGLTPTATDLSNAKTFWGVCRPHTGIRLNWRLIGTPEYVADYVCIHELCHLRHPDHSPRFWHLVNTLTPHTDNAKSWLKAHGRELFVLG

SEQ ID NO: 818 - protein, 397 aa, Neisseria
MSDQKNRRNALIGAAFLMATSAIGPGFLTQTATFTQALAASFGFVILLSILLDIGAQLNIWRIVAVSEKQAQDIANQVLPGAGYFLAVLIVMGGLAFNIGNVGGAGLGLNLLTGLSPETGAVISGVIAIGVFLFKEAGKVMDKFAQVMGFVMIALTVYVAWQANPPLADAAVHTFMPEKLDAMAIVTLVGGTVGGYITFAGAHRLLDAGIKGKSALPEVSQSSVRAILIASIMRIVLFLAVLGVVSQGVQLNPDNPASTPFEYAAGYIGLLIFGVVIWAASITSVIGAAYTSVSFFSGLSPSIERNKNKWIIAFIAVSTAVFSTIGKPAQVLVFVGALNGLILPISLGLILIAAYKTKIVGDYKHPLWLTVSGVIVVGLMAVLSAITISKYIGGLFG

SEQ ID NO: 819 - protein, 245 aa, Neisseria
MKQVDLNADLAEGCGSDEALLQLITSANIACAQHAGSIADIRAALAYAQQNGVRIGAHPGYPDRENFGRTEMNLSEADLRACLNYQLGALQALCRDQGLEMAYVKPHGAMYNQAAKNRALADTVARIVADFDPKLKLMALSGSLLLEAGKAAGLGVISEVFADRRYMPDGTLVPRSRPDAQVDSDEEAIAQVLQMVRDGQVKAVDGSLVAVQADSICLHGDGPHAVVFAEKIRQELLAAGIKVSA

SEQ ID NO: 820 - protein, 215 aa, Neisseria
MRIEITPISESALVYRLNAPSELGKQQKLWAFAAALGQHDRIEEVVVGMNNLTVFTRFDTDLATLADELQYVWEHTAVTDHQGKLVEIPVCYGGEYGPDLAEVAAFHQTVISEIVRRHTAQTYTVFMMGFQPGFPYLGGLPEALHTPRRAVPRTSVPAGSVGIGGSQTGVYPFASPGGWQIIGRTELPLFRADLNPPTLLAAGDQVRFVAERIEP

SEQ ID NO: 821 - protein, 34 aa, Neisseria
MRYFNRNGLRSSEKVQRQGSTFPIDGLMMQHRRY

SEQ ID NO: 822 - protein, 735 aa, Neisseria
MFPDQSAPNLLQGLNPEQLSAVTWPPQSALVLAGAGSGKTRVLTTRIAWLLQSGQASVHSIMAVTFTNKAAKEMQTRLGAMIPINVRAMWLGTFHGLCHRFLRLHHRDAGLPSSFQILDGGDQLSLIKRLLKSLNIAEEIIAPRSLQGFINAQKESGLRASVLSAPDPHTRRMIECYAEYDKICQREGVVDFAELMLRSYEMLQNNEILRQHYQNRFNHILVDEFQDTNKLQYAWLKLIAGNHAAVFAVGDDDQSIYRFRGASVGNMTALMEEFHIDAPVKLEQNYRSVGNILAAANAVIENNDERLGKNLRTDAEAGDKIRYYSAFTDLEEARFILDETKALEREGWDLDEIAVLYRSNAQSRVIEQSLFRSGIPYKIYGGLRFYERQEIKHALAYLRLAVNPDDDNALLRVINFPPRGIGARTVENLQTASNEQGITLWQAACNAGAKAAKVVAFVRLIEALRNQVGQLSLSEIIVGILKDSGLTEHYRTQKGDNQDRLDNLDELVNAAIEFKPEDSNFEILPENISDDPAFPILAFLSNAALESGENQAGAGEKAVQLMTVHAAKGLEFNAVFLTGMEEGRFPSEMSLAERGGLEEERRLMYVAITRARKRLYITMAQQRMLHGQTQFGIVSRFVEEIPPEVLHYLSVKKPAYDSYGNTRQTAASKDKIIDDYKQPQTYAGFRIGQNVRHAKFGTGVIIDAADKGESARLTINFGKQGVKELDTKFAKLEEM

SEQ ID NO: 823 - protein, 33 aa, Neisseria
MGFFYESSPKFQTAFLAVIIVDEAHATMYTQSK

SEQ ID NO: 824 - protein, 179 aa, Neisseria
MSQVFKDFDLSSVWKTNSWADENYKEAPFTPEILAAVESELGYKLPQSFIELMAVQNGGIFVKNCFPTTQRNSWAENHVQICEVSGIGFEKEGSLCGAMGQKLWLEEWEYPPIGVYFANDPSGGHAMFALDYRACGKDGEPKVVFVEQESDFEIVELAPDFETFIRSLRHEDEFIDEEI

SEQ ID NO: 825 - protein, 53 aa, Neisseria
MNIINYKGDDIIISLTREELQLLRSLVIEIYAGVCIDAEEFEIVSGIRNPKLV

SEQ ID NO: 826 - protein, 67 aa, Neisseria
MLKRNLGFDTFKLITIFFLGIRRLQSKHIRAIWDDKSGAIVIRDPNSKDGGTAFRPTLGKTYFDKQK

SEQ ID NO: 827 - protein, 119 aa, Neisseria
MIKLDLKSINLYDIDFEKFTPEIPDNFHRWIDLDIGIEGEQGSSIFSLCICSPKWISHHCNKEGFFWSNALILEQFDHKIIKSEIDKILEYCSKETWDLTLSNLLRFFSWEFEDYNPNT

SEQ ID NO: 828 - protein, 206 aa, Neisseria
MNSTASKTLKGLSLVFFASGFCALIYQVSWQRLLFSHIGIDLSSITVIISVFMVGLGVGAYFGGRIADRFPSSIIPLFCIAEVSIGLFGLVSRGLISGLGHLLVEADLPIIAAANFLLLLLPTFMMGATLPLLTCFFNRKIHNVGESIGTLYFFNTLGAALGSLAAAEFFYVFFTLSQTIALTACFNLLIAASVWLRYRKDGYSEH

SEQ ID NO: 829 - protein, 483 aa, Neisseria
MLSFLSGLLSLGIEVLWVRMFSFAAQSVPQAFSFTLACFLTGIAVGAYFGKRICRSRFVDIPFIGQCFLWAGIADFLILGAAWLLTGFSGFVHHAGIFITLSAVVRGLIFPLVHHVGTDGNKSGRQVSNVYFANVAGSALGPVLIGFVILDFLSTQQIYLLICLISAAVPLFCTLFQKSLRLNAVSVAVSLMFGILMFLLPDSVFQNIADRPDRLIENKHGIVAVYHRDGDKVVYGANVYDGAYNTDVFNSVNGIERAYLLPSLKSGIRRIFVVGLSTGSWARVLSAIPEMQSMIVAEINPAYRSLIADEPQIAPLLQDKRVEIVLDDGRKWLRRHPDEKFDLILMNTTWYWRAYSTNLLSAEFLKQVQSHLTPDGIVMFNTTHSPHAFATAVHSIPYAYRYGHMVVGSATPVVFPNKELLKQRLSRLIWPESGRHVFDSSTVDAAAQKVVSRMLIQMTEPSAGAEVITDDNMIVEYKYGRGI

SEQ ID NO: 830 - protein, 118 aa, Neisseria
MLSAYFPVFVFILIGLAAGVLFILLGTILGPKRHYAEKDAPYECGFEAFENARMKFDVRYYLVAILFILFDLEVAFMLPWAVVFKDLGAYGFWSMLVFIVVLTVGFVYEWKKGALEWE

SEQ ID NO: 831 - protein, 160 aa, Neisseria
MGIEGVLKKGFITTSADTVLNYMRTGSLWPVTFGLACCAVEMMHAGMARYDLDRFGIIFRPSPRQADLMIVAGTLTNKMAPALRRVYDQLAEPRWVLSMGSCANGGGYYHYSYSVVRGADRVVPVDVYVPGCPPTAEALIYGLIQLQQKIKRTSTIARDE

SEQ ID NO: 832 - protein, 197 aa, Neisseria
MASIQDLYETVSRVLGNQAGKVISALGEITVECLPEHYISVMTALRDHEELHFELLVDLCGVDYSTYKNEAWQGKRFAVVSQLLSVKNNQRIRVRVWVSDDDFPVVESVVDIYNSADWYEREAFDMYGIMFNNHPDLRRILTDYGFVGHPFRKDFPISGYVEMRYDEEQKRVIYQPVTIEPREITPRIVREENYGGQ

SEQ ID NO: 833 - protein, 418 aa, Neisseria
MANKLRNYTINFGPQHPAAHGVLRMILELDGEQIVRADPHIGLLHRGTEKLAETKTYLQALPYMDRLDYVSMMVNEQAYCLAVEKLVGIDVPIRAQYIRVMFAEVTRILNHLMGIGSHAFDIGAMTAILYAFRDREELMDLYEAVSGARMHAAYFRPGGVYRDLPDFMPKYEGSKFRNAKVLKQLNESREGTMLDFIDAFCERFPKNIDTLETLLTDNRIWKQRTVGIGVVSPERAMQKGFTGVMLRGSGVEWDVRKTQPYEVYDKMDFDIPVGVNGDCYDRYLCRMEEMRQSVRIIKQCSEWLRVNPGPVITTNHKFAPPKRTEMKTGMEDLIHHFKLFTEGMHVPEGETYTAVEHPKGEFGVYIISDGANKPYRLKIRAPGFAHLQGMDEMAKGHMLADVVAIIGTQDIVFGEVDR

SEQ ID NO: 834 - protein, 157 aa, Neisseria
MLSAESLKQIDIELAKYPADQRRSAIMGALRIAQTEKGWLAPETIAFVADYIGITPAQAYEVATFYNMYDLEPVGKYKLTVCTNLPCALRGGMATGEYLKQKLGIGYGETTPDGKFTLVEGECMGACGDAPVMLVNNHSMCSFMTEEAIEKKLAELE

SEQ ID NO: 835 - protein, 433 aa, Neisseria
MAIYQSGVIFDQVDTANPDCWTLDEYVKRGGYTALRKILSENISQTDVIDEVKTSGLRGRGGAGFPTGLKWSFMPRSFPGEKYVVCNTDEGEPGTFKDRDIIMFNPHALIEGMIIAGYAMGAKAGYNYIHGEIFEGYQRFEAALEQARAAGFLGKNILGSDFEFELFAHHGYGAYICGEETALLESLEGKKGQPRFKPPFPASFGLYGKPTTINNTETFSSVPFIIRDGGQAFADKGIPNAGGTKLFCISGHVERPGNYEVPLGTPFAEVLKMAGGMRGGKKLKAVIPGGSSAPVLPADIMMQTNMDYDSISKAGSMLGSGAIIVMDEDVCMVKALERLSYFYYDESCGQCTPCREGTGWLYRIVHRIVEGKGKMEDLDLLDSVGNQMAGRTICALADAAVFPVRSFTKHFRDEFVHYIEHGGPMKEHKWGGW

SEQ ID NO: 836 - protein, 145 aa, Neisseria
MVEAKIFILYGAANKGKSTTLNTLFNQICRKFSKFLVFFERHGNGLDFVAVFDHEGQRIGFYSSGDNEYEVRGNLYKLYSHNCDFIFGTSRTRGGSCDAVGCYAELLHGDVNIINWCEKFEPTDEDNERAVKELFKSFKNIINEL

SEQ ID NO: 837 - protein, 79 aa, Neisseria
MANGKNGTLYIGVTMNLPERVWQHKNHVNIDGFTARYDVHDLVWYQFFENMPEAVAKEKTMKKWRREWKIKLIEEQNTE

SEQ ID NO: 838 - protein, 753 aa, Neisseria
MLQIEIDGKQVSVEQGATVIEAAHKLGTYIPHFCYHKKLSIAANCRMCLVNVEKAPKPLPACATPVTDGMIVRTHSAKAREAQEGVMEFLLINHPLDCPTCDQGGECQLQDLAVGYGKTTSRYTEEKRSVVGKDMGSLVSAEEMSRCIHCTRCVRFTEEIAGLQEIAMVNRGEHSEIMPFIGKTVETELSGNVIDLCPVGALTSKPFRFNARTWELNRRKSVSAHDALGSNLIVQTKDHTVRRVLPLENEAINECWLSDRDRFAYEGLYHESRLKNPKIKQGGEWMDVDWKTALEYVRSAIECIAKDGKQNQVGVWANPMNTVEELYLAKKLADGLGVKNFATRLRQQDKRLSDGLKGAQWLGQSIESLADNDAVLVVGANLRKEQPLLTARLRRAAKDRMALSVLASSKEELFMPLLSQEAAHPDEWAGRLKNLSVNAEHAVTASLKNAEKAAVILGAEVQNHPDYAAVYAAAQELADATGAVLGILPQAANSVGADVLNVNSGKSVVEMVNAPKQAVLLLNVEPEIDTADGAKAVAALKQAKSVMAFTPFVSETLLDVCDVLLPIAPFTETSGSFINMEGRLQSFHGVVQGFGDSRPLWKVLRVLGNLFDLKGFEYHDTAAILKDALDVESLPSKLDNRNAWTGEGVQTTSDRLVRVGGVGIYHTDSIVRRSAPLQETSHAAVPAARVNPNTLARLGLQDGQTAVAKQNGASVSVAVKADAGLPENVVHLPLHTENAALGALMDTIELAGA

SEQ ID NO: 839 - protein, 358 aa, Neisseria
MQEWFQNLFAATLGLGDLGITVGLVVSVIVKIVIILIPLILTVAYLTYFERKVIGFMQLRVGPNVTGPWGLIQPFADVFKLLFKEVTRPKLSNKALFYIGPIMSLAPSFAAWAVIPFNEEWVLTNINIGLLYILMITSLSVYGVIIAGWASNSKYSFLGAMRASAQSISYEIAMSAALVCVVMVSGSMNFSDIVAAQAKGIAGGSVFSWNWLPLFPIFIVYLISAVAETNRAPFDVAEGESEIVAGHHVEYSGFAFALFFLAEYIFMILIAALTSLMFLGGWLSPFPQSWGIVGTPSAFWMFAKMAAVLYWYLWIRATFPRYRYDQIMRLGWKVLIPIGFAYIVILGVWMISPLNLWK

SEQ ID NO: 840 - protein, 159 aa, Neisseria
MANLVKTFLLGELVKGMGVTLKNFFARKDTIYFPEEKTPQSVRFRGLHAQRRYPNGEERCIACKLCEAVCPAMAINIESEEREDGTRRTKRYDIDLTKCIFCGFCEEACPTDAIVETHIFEYHGEKKGDLHMTKPILLAIGDKYEAEIAKRKAADAPYR

SEQ ID NO: 841 - protein, 235 aa, Neisseria
MEGLINALKYLAEHEPIDNFEEIRTRNSPIELPSGLSNFEQNIFLKENLSPKLQNDDSLKTHYWIIREWGGIKSFKQSAENSQLIRQFLSELNSGKLSSGLLKISSLSKLASFIDCERFAIYDSRAIFSLNWLLFKFTNADLFFQPQGRNRELEIRNMNVLFHFSDIKPNYRKPDVSFHQYCGLLQDLAKQVYGKQAKPYHIEMLLFKIATTWICADMDQLIKFDCLRNQDFQTA

SEQ ID NO: 842 - protein, 223 aa, Neisseria
MTFQLILFYIFAVIILYGALKTVTAKNPVHAALHLVLTFCVSAMLWMLMQAEFLGVTLVVVYVGAVMVLFLFVVMMLNIDIEEMRAGFWRHAPVAGVVGTLLAVALILILVNPKTDLAAFGLMKDIPADYNNIRDLGSRIYTDYLLPFELAAVLLLLGMVAAIALVHRKTVNPKRMDPADQVKVRADQGRMRLVKMEAVKPQVESAEESEVSDDLKPKEEGKA

SEQ ID NO: 843 - protein, 101 aa, Neisseria
MITLTHYLVLGALLFGISAMGIFMNRKNVLVLLMSIELMLLAVNFNFIAFSQHLGDTAGQIFVFFVLTVAAAESAIGLAIMVLVYRNRQTINVADLDELKG

SEQ ID NO: 844 - protein, 191 aa, Neisseria
MPSENPIGKTMKSIDEQSLHNARRLFESGDIDRIEVGTTAGLQQIHRYLFGGLYDFAGQIREDNISKGGFRFANAMYLKEALVKIEQMPERTFEEIIAKYVEMNIAHPFLEGNGRSTRIWLDLVLKKNLKKVVNWQNVSKTLYLQAMERSPVNDLELRFLLKDNLTDDVDNREIIFKGIEQSYYYEGYEKG

SEQ ID NO: 845 - protein, 113 aa, Neisseria
MMDKNQLEQEFHKAMLNIYQEALNLPQPYKATRFLQIVNEFGGKEAADKLLSTGEKKTQTGFTELILSGGGVHALKYSMEYLVLQKPWCDLFTEEQLAVARKRLERVGFVFPK

SEQ ID NO: 846 - protein, 674 aa, Neisseria
MNDMTLYLIIALVPLAGSLIAGLFGNKIGRAGAHTVTILGVAVSAVLSAYVLWGFIDGSRAKFDENVYTWLTMGGLDFSVGFLVDTMTAMMMVVVTGVSLMVHIYTIGYMHDEKVGYQRFFSYISLFTFSMLMLIMSNNFIQLFFGWEAVGLVSYLLIGFYFKRPSATFANLKAFLINRVGDFGFLLGIGLVLAYFGGSLRYQDVFAYLPNVQNATIQLFPGVEWSLITVTCLLLFVGAMGKSAQFPLHVWLPDSMEGPTPISALIHAATMVTAGLFMVSRMSPIYEMSSTALSVIMVIGAITALFMGFLGVIQNDIKRVVAYSTLSQLGYMTVALGASAYSVAMFHVMTHAFFKALLFLAAGSAIIGMHHDQDMRHMGNLKKYMPVTWLTMLIGNLSLIGTPFFSGFYSKDSIIEAAKYSTLPGSGFAYFAVLASVFVTAFYAFRQYFMVFHGEEKWRSLPEHHSDGHGEEHHGLGKNDNPHESPLVVTLPLILLAVPSVIIGYIAIEPMLYGDFFKDVIFVNADAHPTIHIMKEEFHGALAMVSHSLHSPVLYLAIAGVLSAWLLYVKLPHLPAKIAQTFRPIYVLFENKYYLDALYFNVFAKGTRALGTFFWKVGDTAIIDNGIVNGSAKLVGAIAAQVRKAQTGFIYTYAAAMVFGVLVLLGMTFWGLFR

SEQ ID NO: 847 - protein, 498 aa, Neisseria
MFSNYLLSLAIWIPIAAGVLVLATGSDSRAPFARVLAFMGALAGFLVTLPLFTGFDRLSGGYQFTEFHEWIPLLKINYALGVDGISVLFIILNAFITLLVVLAGWEVIQKRPAQYMAAFLIMSGLINGAFAAQDAILFYVFFEGMLIPLYLIIGVWGGPRRVYASVKLFLYTLMGSLLMLVAMVYLYYQTGSFSIVDFQNIEQIPLGVQQLLFVAFFLSFAVKVPMFPVHTWLPDAHVEAPTGGSMVLAAITLKLGAYGFLRFILPIMPDAARYFAPVIIVLSLIAVIYIGMVALVQTDMKKLVAYSSISHMGFVTLGMFLFVDGQLDDWALKGAIIQMISHGFVSAAMFMCIGVMYDRLHTRNIADYGGVVNVMPKFAAFMMLFGMANAGLPATSGFVGEFMVIMGAVKVNFWVGALAAMTLIYGASYTLWMYKRVIFGAIHNPHVAEMQDINCREFAILAILAVAVLGMGLYPNAFIEVVHQAANDLIAHVAQSKI

SEQ ID NO: 848 - protein, 480 aa, Neisseria
MNWSDLNLMPAMPEIVLLSLLVLLLLADLWVSDDKRPWTHYGALATVAVTAVVQLAVWEQGSTSSFNGMYIADGMSRLAKMVLYALTFALFVYAKPYNQVRGIFKGEFYTLSLFALLGMSVMVSAGHFLTAYIGLELLSLALYALIALRRDSGFAAEAALKYFVLGALASGLLLYGISMVYGATGSLEFAGVLASSFNEEANEWLLKLGLVFIVVAVAFKLGAVPFHMWVPDVYHGAPTSVTALVGTAPKIAAVVFTFRILVTGLGTVHHDWSLMFALLAAASLLVGNLAAIMQTNIKRMFAYSTVSHMGFILLAFMAGAVGFAAGLYYAITYALMAAAGFGVLMVLSDGDNECENISDLAGLNQHRVWLAFLMLLVMFSMAGIPPLMGFYAKFGVIMALLKQGHVWLSVFAVIMSLIGAFYYLRVVKVIYFDVPDHDQPVGSNYAAKFVLTVNAFLLLLWGIMPQTVIDWCAKALENTL

SEQ ID NO: 849 - protein, 128 aa, Neisseria
MPFRNAVQTASPPTTPKQKAHHDRIHVHPFGLGTHLCQRPLPHDQTVRRGRTQAQTFRTPHDRAGGRFRADRRSCLHPRIPCRIGTRSGLGVLCHSRLPVPDFCVSMFCVAVFLAHAQQGIDKHRNAV

SEQ ID NO: 850 - protein, 259 aa, Neisseria
MRYAALDGGKRLRPMLVLAASELGEAVHEAVEQAMAAIEMIHVYSLVHDDMPAMDNDSLRRGKPTCHIKYGEATALLTGDALQTQAFDVLSRPTELPAARQLAMLSVLAKAGGSRGMAGGQAIDLANVGKQMVQADLEQMHSLKTGALIRAAVLLGATACPDLSDAELSVLDAYAAKLGLAFQVIDDVLDCEADTATLGKTAGKDADNDKPTYVKLMGLEAARSYAHKLVAEAVALLEPFGDKALRLRQLAEFAVARKY

SEQ ID NO: 851 - protein, 74 aa, Neisseria
MKKNAPKSFEEALSRLESLTQSMQGEMPLEDALAAYQEGNELVRYCQTKLAQVEQKLQVLDTDGLKELNLESDE

SEQ ID NO: 852 - protein, 307 aa, Neisseria
MPSEHPFSDGIPTPNPKETMNDTAQITASYGRRYIVRTPDGTTYEASTRKKRVDFACGDRVRISPVNAEQVVIEDFLPRQSLLYRQDAWKTKLIAANVTQLLIVTAAVPSPSVRLLQRALLAAEAAGIEAVIVLNKADLPETALWREKLKFYETLGYPVIETRALENAGSLRPALQGHSNILLGQSGMGKSTLTNALLGSQTARTGDISAALDSGKHTTTHARLYDLNGETQLIDSPGLQEFGLHHLQAADLPRYFPDFRHLVGQCRFHNCTHRAEPGCAFKAAAQTGAASPERLAFLQGITDELPG

SEQ ID NO: 853 - protein, 618 aa, Neisseria
MLNKIFSWFESRIDPYPEAAPKTPEKGLWRFVWSSMAGVRKWIAALAALTAGIGIMEALVFQFMGKIVEWLGKYAPAELFAEKSWELAAMAAMMVFSVAWAFAASNVRLQTLQGVFPMRLRWNFHRLMLNQSLGFYQDEFAGRVSAKVMQTALALRDAVMTVADMVVYVSVYFITSGVILASLDSWLLLPFIGWIVGFASVMRLLIPKLGQTAAWQADARSLMTGRITDAYSNIATVKLFSHGAREAAYAKQSMEEFMVTVRAQMRLATLLHSCSFIVNTSLTLSTAALGIWLWHNGQVGVGAVATATAMALRVNGLSQYIMWESARLFENIGTVGDGMATLSKPHTILDKPRALPLNVPQGAIKFEHVDFSYEAGKPLLNGFNLTIRPGEKVGLIGRSGAGKSTIVNLLLRFYEPQSGTVSIDGQDISGVTQESLRAQIGLVTQDTSLLHRSVRDNIIYGRPDATDAEMVSAAERAEAAGFIPDLSDAKGRRGYDAHVGERGVKLSGGQRQRIAIARVMLKDAPILLLDEATSALDSEVEAAIQESLDKMMDGKTVIAIAHRLSTIAAMDRLVVLDKGRIIEEGTHAELLEKRGLYAKLWAHQSGGFLNEHVEWQHD

SEQ ID NO: 854 - protein, 194 aa, Neisseria
MISRLTGKLVEKNPPQIVIDVNGVGYEADVSMQTFYNLPPVGESVQLFTQLIIREDAHLLFGFATAEERKTFRQLIKVGGIGAKTALGILSAMTADELARAVAEEDVKRLSSAPGIGKKTAERMVLELRGKLVAHTVTDGLFAAAPAADETEDIVSTLLALGYSEREAKAAVKGVPEGTDVGEGVRLALKNLLK

SEQ ID NO: 855 - protein, 108 aa, Neisseria
MNIKHLLLTSAATALLSISAPALAHHDGHGDDDHGHAAHQHNKQDKIISRAQAEKAALARVGGKITDIDLEHDNGRPHYDVEIVKNGQEYKVVVDARTGRVISSRRDD

SEQ ID NO: 856 - protein, 239 aa, Neisseria
MTLTRKTLFLLTAAFGTHSLQTASADAVVKAEKLHASANRSYKVAGKRYTPKNQVAEFTQTGNASWYGGRFHGRKTSGGERYDMNAFTAAHKTLPIPSYVRVTNTKNGKSVIVRVNDRGPFHGNRIIDVSKAAAQKLGFVNQGTAHVKIEQIVPGQSAPVAENKDIFIDLKSFGTEHEAQAYLNQAAQNFAVSSSGTNLSVEKRRYEYVVKMGPFTSQERAAEAEAQARGMVRAVLTAG

SEQ ID NO: 857 - protein, 154 aa, Neisseria
MFTIVLYQPEIPPNTGNIIRLCANTGADLHLVKPLGFPLDSAKMKRAGLDYHEFASLTVHENFDDCLKALAGRRIFALTTKGTARPDETAFQKGDVLLFGPETRGLPADILDSLPAAQKIRLPMQPGSRSMNLSNTVAVILFEAWRQHGYAGGV

SEQ ID NO: 858 - protein, 241 aa, Neisseria
MDFLSRWRRIADAPTIRRCVLCHGSSGVSDGICAGCRDDLAAYRTDAANSCPLCFRHIQGGSVCGGCQKKPPAFDRMWASLHYEPPVSNMIHALKHLADLSMVQPLADLMMQNPPDRLADECFDFVLPVPLSRERLLQRGFNQSESIVGLLAQRYGWQILPRHTVFRHHRPPQSTLKGGERRRNIKNAFEIRTPIPENCNILLIDDVFTTGATLDELAKTLKKSGANRICCWTLARTPMKK

SEQ ID NO: 859 - protein, 249 aa, Neisseria
MPDAVKKVYLIHGWGANRHMFDDLMPRLPATWPVSAVDLPGHGDAPFVRPFDIAAAADGIAAQIDAPADILGWSLGGLVALYLAARHPDKVRSLCLTASFARLTADEDYPEGLAAPALGKMVGAFRSDYAKHIKQFLQLQLLHTPDADGIIGRILPDLARCGTPQALQEALDAAERADARHLLDKIDVPVLLVFGGKDAITPPRMGEYLHRRLKGSRLVVMEKAAHAPFLSHAEAFAALYRDFVEGGLR

SEQ ID NO: 860 - protein, 262 aa, Neisseria
MNHQDARWQVHRHLAEHTDQRLTLVRNAPKHILLAGADADISRSLLAKRYPQAVFEEYDSRADFLAAAAAARKGGFWQRFTGKGVVQHCQSPIAPLPEACADMLWSNLGLLAAEQILPVLHNWARALKTDGLLFFTCFGRDTLAELKCRLKENGIESRSALFPDMHDLGDMLAENGFYDPVTDTAKLVLDYKKAETFWADMDTLGVWRAMAWNDENAARSCVGTIFEREGGLGITLETVYGHAVKKLMLPQGENVVQFFPKR

SEQ ID NO: 861 - protein, 98 aa, Neisseria
MNKKLNYIFMLDCLGLVILFTCIIATFERDYGFKIFTNSKRPEFYYWIGMFYYGIISCWFDYQLISTKANSYKRKVKQYKIFSVIFSVLIFISTIVKL

SEQ ID NO: 862 - protein, 141 aa, Neisseria
MYWERGLHMYKASAVVPTGYVRVGNTAPLVGEDTQRYASFWGDGYDVYRQLRWQQIPEKQRKAFKKAAKSKKTVMFAGREYGISKQNLSDVWDDFEDAMELKAFPCLSSLFLTKWHKNLYDSGLTKTSTALPRLSSKRTIL

SEQ ID NO: 863 - protein, 766 aa, Neisseria
MHRPTAKQILHEVFGYPEFRGRQEAVINTLAGGGSLTVLMPTGGGKSLCYQIPALMREGVAVVVSPLIALMNDQVANLHAAGIEAAAVNSGTSADEAREIADRLAQGRLKLLYVAPERLVTDRFLRFLDQQTVSLFAIDEAHCVSQWGHDFRPEYQQLGMLAERYPNVPRIALTATADAATRADIKHYLHLDDAPEFVSSFDRPNIYYQVIEKNNGKKQLLDFIRKEMTGQSGIVYCLSRKKVEDVAQFLRENGLNAIPYHAGLSMDVREENQRRFTHEDNIIVVATVAFGMGIDKPDVRFVAHLDMPQSVEHFYQESGRAGRDGLPAASWLCYGLNDWVLLRERIAEGNSDEVQKQIEMQKLDAMLAVCETAACRRVLLLKHFGEASEPCGHCDNCLHPPVRFDGTVLVQKLLSCVYRAGQRFAAGYITNILRGKSDDWIRGNRHEQLSTFGIGTELSDKEWRSVIRQCISLGYLTVNITRYQALQLTEAAKKVLKGETEVMLRPLKRDKPAARTLKDNWLRTEREERLWQALRVWRMKQAEAEGIPAYMIFGDKTLRDLVEKMPQDLNGLHDIYGLGEAKIDRFGHGILEVCRNAAGFSRDAVIRPQTEREQQLRQKLEAWRYEQARAENCALHAVLSDESLADMLADTPETETDLEGVYGLGSVRAAKYGRDILAVCRPFSDGIDETAKRKRRLMRALIQWCGETAKHEQSEPYRILSKAALRAIAAKQPEGLAELAAVYGVGEEKAARYGAAVLAVLERNAV

SEQ ID NO: 864 - protein, 260 aa, Neisseria
MTDILNKILATKAQEVAAQKAAVNAEHIRTLAAEAAPVRSFIDSIRGKHRLNLPAVIAEIKKASPSKGLIRPDFRPAEIARAYENAGAACLSVLTDEPYFQGSPEYLKQAREAVSLPVLRKDFIIDEYQVYQARAWGADAVLLIAAALEQEQLERFEAVAHELGMTVLLELHDETELEKCRNLTTPLWGVNNRNLRTFEVSLDQTLSLLPALEGKTVVTESGITGKADVEFMQSRGVHTFLIGETFMRADDIEAEVGKLF

SEQ ID NO: 865 - protein, 318 aa, Neisseria
MILTPPDTPFFLRNGNADTIAAKFLQRPAPAYRRELLPDSTGKTKVAYDFSDGISPDAPLVVLFHGLEGSSRSHYAVELMLAVRDRGWHGVVVHFRSCGGIANTAPVFYHLGDTAEIAFTLDTFAARYREIYAVGVSLGGNALAKYLGEQGKKALPQAAAVISAPVDAEAAGRRFDSGITRLLYTRYFLRTLIPKAKSLQGFQTAFAAGCKTLGEFDDRFTAPLHGFADRHDYYRQTSCKPLLKHVAKPLLLLNAVNDPFLPPEALPRADEVSEAVTLFQPAYGGHVGFVSSTGGRLHLQWLPQTVLSYFDSFRTNRR

SEQ ID NO: 866 - protein, 513 aa, Neisseria
MMNMLGALAKVGSLTMVSRVLGFVRDTVIARAFGAGMATDAFFVAFKLPNLLRRVFAEGAFAQAFVPILAEYKETRSKEAAEAFIRHVAGMLSFVLVIVTALGILAAPWVIYVSAPGFAQDADKFQLSIDLLRITFPYILLISLSSFVGSVLNSYHKFGIPAFTPTFLNVSFIVFALFFVPYFDPPVTALAWAVFVGGILQLGFQLPWLAKLGFLKLPKLSFKDAAVNRVMKQMAPAILGVSVAQVSLVINTIFASYLQSGSVSWMYYADRMMELPSGVLGAALGTILLPTLSKHSANQDTEQFSALLDWGLRLCMLLTLPAAVGLAVLSFPLVATLFMYREFTLFDAQMTQHALIAYSFGLIGLIMIKVLAPGFYARQNIKTPVKIAIFTLICTQLMNLAFIGPLKHVGLSLAIGLGACINAGLLFYLLRRHGIYQPGKGWAAFLAKMLLSLAVMCGGLWAAQAYLPFEWAHAGGMRKAGQLCILIAVGGGLYFASLAALGFRPRHFKRVEN

SEQ ID NO: 867 - protein, 232 aa, Neisseria
MKSRHLALGVAALFALAACDSKVQTSVPADSAPAASAAAAPAGLVEGQNYTVLANPIPQQQAGKVEVLEFFGYFCPHCAHLEPVLSKHAKSFKDDMYLRTEHVVWQKEMLTLARLAAAVDMAAADSKDVANSHIFDAMVNQKIKLQNPEVLKKWLGEQTAFDGKKVLAAYESPESQARADKMQELTETFQIDGTPTVIVGGKYKVEFADWESGMNTIDLLADKVREEQKAAQ

SEQ ID NO: 868 - protein, 334 aa, Neisseria
MQRQIKLKNWLQTVYPERDFDLTFAAADADFRRYFRATFSDGSSVVCMDAPPDKMSVAPYLKVQKLFDMVNVPQVLHADTDLGFVVLNDLGNTTFLTAMLQEQGETAHKALLLEAIGELVELQKASREGVLPEYDRETMLREINLFPEWFVAKELGRELTFKQRQLWQQTVDTLLPPLLAQPKVYVHRDFIVRNLMLTRGRPGVLDFQDALYGPISYDLVSLLRDAFIEWEEEFVLDLVIRYWEKARAAGLPVPEAFDEFYRWFEWMGVQRHLKVAGIFARLYYRDGKDKYRPEIPRFLNYLRRVSRRYAELAPLYALLVELVGDEELETGFTF

SEQ ID NO: 869 - protein, 758 aa, Neisseria
MSEPIQPTSLSLGSTCLFCSNESGSPERTEAAVQGSGEASIPEDYTRIVADRMEGQSQVQVRAEGNVVVERNRTTLNTDWADYDQSGDTVTAGDRFALQQDGTLIRGETLTYNLEQQTGEAHNVRMEIEQGGRRLQSVSRTAEMLGEGHYKLTETQFNTCSAGDAGWYVKAASVEADREKGIGVAKHAAFVFGGVPIFYTPWADFPLDGNRKSGLLVPSLSAGSDGVSLSVPYYFNLAPNLDATFAPSVIGERGAVFDGQVRYLRPDYAGQSDLTWLPHDKKSGRNNRYQAKWQHRHDISDTLQAGVDFNQVSDSGYYRDFYGNKEIAGNVNLNRRVWLDYGGRAAGGSLNAGLSVLKYQTLANQSGYKDKPYALMPRLSVEWRKNTGRAQIGVSAQFTRFSHDSRQDGSRLVVYPDIKWDFSNSWGYVRPKLGLHATYYSLNRFGSQEARRVSRTLPIVNIDSGATFERNTRMFGGEVLQTLEPRLFYNYIPAKSQNDLPNFDSSESSFGYGQLFRENLYYGNDRINTANSLSAAVQSRILDGATGEERFRAGIGQKFYFKDDAVMLDGSVGKKPRNRSDWVAFASGSIGSRFILDSSIHYNQNDKRAENYAVGASYRPAQGKVLNARYKYGRNEKIYLKSDGSYFYDKLSQLDLSAQWPLTRNLSAVVRYNYGFEAKKPIEVLAGAEYKSSCGCWGAGVYAQRYVTGENTYKNAVFFSLQLKDLSSVGRNPADRMDVAVPGYITAHSLSAGRNKRP

SEQ ID NO: 870 - protein, 348 aa, Neisseria
MMKIKALMIAAALLAAADVHAAPQKAKTASAKAAKAAKAAKVAKVAKVAKVAATAQKEAAPAQQQGGIRFSDGIAAVADNEVITRRRLAEAVAEAKANLPKDAQISESELSRQVLMQLVNQSLIVQAGKRRNIQASEAEIDAVVAKNPALKNLSPAQRRDFADNIIAEKVRQQAVMQNSRVSEAEIDAFLEQAQKQGITLPEGAPLRQYRAQHILIKADSENAAVGAESTIRKIYGEARSGTDFSSLARQYSQDASAGNGGDLGWFADGVMVPAFEEAVHALKPGQVGAPVRTQFGWHIIKLNEVRDAGTPQERIRNSVRQYIFQQKAEQATVNLLRDLHSGAYVDIR

SEQ ID NO: 871 - protein, 626 aa, Neisseria
MNIFYEESGQFKIAAIIQKNDATYQVDTPHGKRTKVKANNVFAEFDGDMAAFLENAQAQAADIDTDLLWEVCGEEEFTAEAIAEEYYGHAPTKTELAATLIALYAAPMYFYKKAKGVFKAAPEETLKQALAAIERKKQQDAQIDAWAEALKRGEMPSEIAADLKTILHAPDKQSLTYKAFTKAADALKTSAYELAKKTGGITSIPQYLQDGFEIKYFPKGTGFPDLALPEMPDLPKADVTAFSIDDESTTEVDDALSLTDLDNGTKRVGIHIAAPSLAVKPGDKMEKNIMERLSTVYFPGGKITMLPENWIAAFSLDAGAHRPAVSIYFDVDGEFNVGAPTCKIEAVNIATNLRIQAIEPHFNAETGLDEAGEMMFAHHQDLIWFYQFATALQKARGKYEPDRAPQYDYSIELDEEGKVSVVRRERGSPIDTLVSEMMILANSTWAQMLHDNDLPGLFRVQPTGKVRMSTKSEPHIGMGVQHYGWFTSPLRRAADYINQKQLISLIDDTAEPLYQNSDAELFAALRDFDAAYTAYADFQRQMEAYWSLVYLQQQGTSELTATILKEDLVRIEGLPLVTRATGIPFDALPKSQALFKITELDAEKQFVSLNYIKAVAPAGTTAGNAV

SEQ ID NO: 872 - protein, 210 aa, Neisseria
MENTNRVPEQARYDAERRQADEALAGVFPAVSIFGSARTPQNHADYAFACRLARRLSDSGIAVISGGGPGIMEAANKGAFAGKSVSVGLNIVLPHEQKPNPYQDIALRFSRFAERKAVFFRYSQAYVVMPGGFGTLDELFEILTLVQTGKVPPRPIVLVGKAFWSGLAEWINAQLLARGLISEGAVSLFAISDDEDEIVAYLSEHGLQTA

SEQ ID NO: 873 - protein, 456 aa, Neisseria
MINPIASLSPLDGRYAQSVEALRPIFSEYGLMKARVKVELNWLKALAAEPKIAEVPPFSAETLAEIDTVIENFSLEDAAAVKAIEATTNHDVKAIEYWLKKRFAEVPEVAAVSEFIHFACTSEDINNLSHALMLQEAREAVLLPKLAEIIEKLTAMAHDLAAVPMMSRTHGQPATPTTLGKETANVVYRLQRQFKNLQAQEFLGKINGAVGNYNAHMVAYPDVDWETHCRNFVEISLGLTFNPYTIQIEPHDYMAEFFQTLSRINTILIDFNRDVWGYISLGYFKQKVKAGEVGSSTMPHKVNPIDFENSEGNLGMANAVLGFLSEKLPISRWQRDLTDSTVLRNMGVGVGYAVLGFAAHLRGLNKLEPNPAALAADLDATWELLAEPIQTVMRRYGVANPYEKLKDLTRGKGGITPEVLKGFIGLLEIPAEAKAKLLELTPALYVGKAEALAKRI

SEQ ID NO: 874 - protein, 204 aa, Neisseria
MNFTRLLNQVLSTVQKKGNTFSDSPLNSFGGGALVAGVASMLLNGKNRKTITKIGSTAALGYLAYRGYQMWQQNKGRATVTQSDFQPAGETEETYSRTVLRTMIAAAASDGMIDEAERRTIEQESGTDPETAAWLAAEYRLPASIEDIAAAVGNDEALAAEAYLAARLVCADLSRKETVFLARLSQALKLDDNLVESLERQLGF

SEQ ID NO: 875 - protein, 716 aa, Neisseria
MLTDLEKNAIRDHYQNIGKNLPGFRPRASQREMIAAVANAFSRTLAREEGGEPPKREGESIAVIEGPTGVGKSLAYLLAGGIMAQTRGKRLIVSSATVALQEQLVDRDLPFLVEKSGLELTFALAKGRGRYLCPYKLYRLTQSNAQQNLLGFEAPAVLWDSKPKPEELKLLRDIADEFSARRFNGDRDTWPEKIDDAIWLKVTNDRHGCLKTACPNRPECPFYLARDVLETVDVVVANHDLLLADISMGGGVILPAPENSFYCIDEAHHLPKKALSRFAAEHSWNIAVWTLEKLPQLTGKIAALTDKAELANLADEAAASLLDSLHEWQFHLAEEPSLSLGVSENDRRTNSEPTWLWEDGKIPEGLETTVSNTAIAARSLLKHVIGLNDALSAARREKEQDGALLDRLTSEFGLFIARIEQISAVWDLLSTVPLEGEEPLAKWITRRADDKNDYIFNASPISSASHLANSLWRRAAGAVLTSATLQSLGNFNLMLRQTGLQWLPETTTLALKSPFDFEKQGELYIPPIYASPKDPEAHTAAVIEWLPKLISPTEAIGTLVLFSSRKQMQDVALRLPGDYLPLLLVQGELPKAVLLQKHHRAIEEGKASIIFGLDSFAEGLDLPGTACVQVIIAKLPFAMPDNPIEKTQNRWIEQRGGNPFIEITVPEAGIKLIQAVGRLIRTEQDYGRVTILDNRIKTQRYGQQLLAGLPPFKRIG

SEQ ID NO: 876 - protein, 76 aa, Neisseria
MGGEVNRADVVGFLVAAFEIPVVALDCGYVAVPVVGRRGNRMRPLPCAADDGLAAFFAGDGNGVGLGGGDLGIPDD

SEQ ID NO: 877 - protein, 303 aa, Neisseria
MDTLFSLKVFRQVVQSGGFTRAADALGISTAMASKHVSHLENTVQAKLLHRNSRNLSLTEAGEEYYRQCSYALDTLDDAAQKAAGGTEKPQGLLRVTMPLWFAGSQICNWLAEYRERYPEVALELILDNRHVDLIAEGVDLALRVSQTLSPSLIARPLAEIEFALLASPDFLRRNGVPETPEEVAGLPAVLPTYTNQQKLDLTRKSDGKKYRLELTPVIRTDNTLMMREMIKAGACIGYQPLWAAEHDLRCGTLVRLLPGYAVPTDRLNAVYADRAFLSAKVRSFIDFLNEKIASRKGCRNAV

SEQ ID NO: 878 - protein, 132 aa, Neisseria
MSDCCNRIQPVLLSVLRIVTAYLFLLHGTSKIFAFPIEMGSGSPGGLLLLAGILEIVGGILLVLGLFARPAAFVLSGQMAVAYFMAHASGNALFPIANGGESAVLFCFVFLYIAAAGGGAWSLDRLFFKRKA

SEQ ID NO: 879 - protein, 201 aa, Neisseria
MTRQSLQQAAESRRSIYSLNKNLPVGKDEVVQIVEHAVLHTPSSFNSQSARVVVLFGEEHDKVWQFVEDALRAVVPADSFEPTAQKLNLFKAGAATILFYEDQNVVKGLQEQFPAYAANFPVWADQANAMVQYAVWTTLAAVGVGANLQHYNPLPDAAIAKAWNIPENWLLRAQMVIGGIEGAAGEKTFEPVAERLKVFGA

SEQ ID NO: 880 - protein, 703 aa, Neisseria
MKISFHLALLPTLIIASFPVAAADTQDNGEHYTATLPTVSVVGQSDTSVLKGYINYDEAAVTRNGQLIKETPQTIDTLNIQKNKNYGTNDLSSILEGNAGIDAAYDMRGESIFLRGFQADASDIYRDGVRESGQVRRSTANIERVEILKGPSSVLYGRTNGGGVINMVSKYANFKQSRNIGAVYGSWANRSLNMDINEVLNKNVAIRLTGEVGRANSFRSGIDSKNVMVSPSITVKLDNGLKWTGQYTYDNVERTPDRSPTKSVYDRFGLPYRMGFAHRNDFVKDKLQVWRSDLEYAFNDKWRAQWQLAHRTAAQDFDHFYAGSENGNLIKRNYAWQQTDNKTLSSNLTLNGDYTIGRFENHLTVGMDYSREHRNPTLGFSSAFSASINPYDRASWPASGRLQPILTQNRHKADSYGIFVQNIFSATPDLKFVLGGRYDKYTFNSENKLTGSSRQYSGHSFSPNIGAVWNINPVHTLYASYNKGFAPYGGRGGYLSIDTLSSAVFNADPEYTRQYETGVKSSWLDDRLSTTLSAYQIERFNIRYRPDPKNNPYIYAVSGKHRSRGVELSAIGQIIPKKLYLRGSLGVMQAKVVEDKENPDRVGIHLNNTSNVTGNLFFRYTPTENLYGEIGVTGTGKRYGYNSRNKEVTTLPGFARVDAMLGWNHKNVNVTFAAANLLNQKYWRSDSMPGNPRGYTARVNYRF

SEQ ID NO: 881 - protein, 231 aa, Neisseria
MKLKTLALTSLTLLALAACSKQAETSVPADSAQSSSSAPAAPAELNEGVNYTVLSTPIPQQQAGKIEVLEFFGYFCPHCAHLEPVLSEHIKTFKDDTYMRREHVVWGDEMKPLARLAAAVEMAGESDKANSHIFDAMVNQKINLADTDTLKKWLSEQTAFDGKKVLAAFEAPESQARAAQMEELTNKFQISGTPTVIVGGKYQVEFKDWQSGMTTIDQLVDKVREEQKKPQ

SEQ ID NO: 882 - protein, 456 aa, Neisseria
MLDNLTGRFSNVFKNIRGQAKLTEDNIKEALREVRLALLEADVALPVVKEFINNVKEKALGQEVAGSLTPDQAFIGVVNKALTELMGRENKTLDLSVAPPAVVLMAGLQGAGKTTTVGKLARLLKNDQKKKVLVVSADVYRPAAIEQLRLLAEQVGVDFFPSDTNQKPVEIATAAVDYAKKHFYDVLMVDTAGRLAIDEEMMNEIKALHAAVNPVETLFVIDAMLGQDAVNTAQAFNEALPLTGVVLTKMDGDSRGGAALSVRHVTGKPIKFIGVGEKINGLEPFHPDRLAGRILGMGDVLTLIEDVQKGIDEEAAAKMAKKLHKGKGFDLNDFKEQIQQMRNMGGLENLMSKMPGELGQISKQIPEGTAEKAMGKVEAIINSMTPKERANPALLKASRKRRIAMGAGTTVQEVNKLLKQFEQMQQMMKMFSGNGLGKLMRMAKGMRGIKGMFPGL

SEQ ID NO: 883 - protein, 268 aa, Neisseria
MPTVFIFLTAVYAGLGAFAWHCQQQGCGRDYPWKTELPVLGAALTVHGAALLMPVIQDKIIIMGFGYSGSLIVWMMLFIYFAGSFFYPLRGVQLLLYPCAALMLLSGLVFPGKFSGYEITDLPFMLHIGTSLLAYGLFGIATLLSVLTLLLNRSLHRRSFSKLAGFLPSLLSLEKLMFQAMWAGFILLTYSVVSGTFFAEAVFGKPMTFTHKTVFGILSWLIYGGLLLKHSMTAWRGKKAAVWTIIGFVSLMIAYMGSKFVLEIILKR

SEQ ID NO: 884 - protein, 32 aa, Neisseria
MPSESPSFRQHIHKGAPAGGGRGKDCWRRRSI

SEQ ID NO: 885 - protein, 61 aa, Neisseria
MTNFPKKIPLKALTVFPCGRIVRFFAAAEVADELKSIAQNVGDIERYLDRRKEYFIIRNAL

SEQ ID NO: 886 - protein, 148 aa, Neisseria
MSVMAGRHPYGVRSGLRRNGLKLWDIHFRMTRFIVARCGLLFATLKGKTMKKMFVLFCMLFSCAFSLAAVNINAASQQELEALPGIGPAKAKAIAEYRAQNGAFKSVDDLTKVKGIGPAVLAKLKDQASVGAPAPKAPAKPVLPADKK

SEQ ID NO: 887 - protein, 68 aa, Neisseria
MFDGAKVVRRVEGNLWVFGMVALEKTCFKGQMPSENRFQTAFSVYLKQTGKGSNILQSSYSHKRFIVN

SEQ ID NO: 888 - protein, 85 aa, Neisseria
MTTQMGASRDVSKSAKGWSVGIGLNVGKQLTDSVGLEFDPYYRHKTIYKPREIVLDGDKTKMGRSKSNEYGFRVAATFYSQLKSK

SEQ ID NO: 889 - protein, 52 aa, Neisseria
MLKTKRTHCLKKDLMGMRVFPTLFPFIYPHYRKKNMKKPCLHSHLQPCPPLR

SEQ ID NO: 890 - protein, 64 aa, Neisseria
MLLQRSLLVYEILPDVKAESAAGVFCTGLSWKWENGCSVQVCPNEWRVLFLSICFFLFEIKFLK

SEQ ID NO: 891 - protein, 351 aa, Neisseria
MTHHYPTDDIKIKEVKELLPPIAHLYELPISKEASGLVHRTRQEISDLVHGRDKRLLVIIGPCSIHDPKAALEYAERLLKLRKQYENELLIVMRVYFEKPRTTVGWKGLINDPHLDGTFDINFGLRQARSLLLSLNNMGMPASTEFLDMITPQYYADLISWGAIGARTTESQVHRELASGLSCPVGFKNGTDGNLKIAIDAIGAASHSHHFLSVTKAGHSAIVHTGGNPDCHVILRGGKEPNYDAEHVSEAAEQLRAAGVTDKLMIDCSHANSRKDYTRQMEVAQDIAAQLEQDGGNIMGVMVESHLVEGRQDKPEVYGKSITDACIGWGATEELLALLAGANKKRMARAS

SEQ ID NO: 892 - protein, 162 aa, Neisseria
MLKITLIAACAENLCIGAGNAMPWHIPEDFAFFKAYTLGKPVIMGRKTWESLPVKPLPGRRNIVISRQADYCAAGAETAASLEAALALCAGAEEAVIMGGAQIYGQAMPLATDLRITEVDLSVEGDAFFPAIDRTHWKEAERTERRVSSKGTRYAFVHYLRY

SEQ ID NO: 893 - protein, 158 aa, Neisseria
MPIEIERRFLIGNDNWRQYADEPLLLRQGYLSVEKERTVRVRIAGKQAWLTLKGYISEISRSEFEYEIPLADAEKMMETMCPFKMEKWRYPVRWGGSLFEIDVFLGDNAPLVVAEIELPDENADFDRPDWLGREITADGMFTNAYLSRHPFSSWKNAV

SEQ ID NO: 894 - protein, 142 aa, Neisseria; identical to SEQ ID NO: 380

SEQ ID NO: 895 - protein, 81 aa, Neisseria
MLKSIELNSHIRNRLAEYLKGRGMDFQTAMQEEKGNKEIAAIVHSGLPTLVRKLYSEQKMQKFFWEKRDLIADYISRRMQG

SEQ ID NO: 896 - protein, 488 aa, Neisseria
MVIFYFCGKTFMPARNRWMLLLPLLASAAYAEETPREPDLRSRPEFRLHEAEVKPIDREKVPGQVREKGKVLQIDGETLLKNPELLSRAMYSAVVSNNIAGIRVILPIYLQQAQQDKMLALYAQGILAQADGRVKEAISHYRELIAAQPDAPAVRMRLAAALFENRQNEAAADQFDRLKAENLPPQLMEQVELYRKALRERDAWKVNGGFSVTREHNINQAPKRQQYGKWTFPKQVDGTAVNYRLGAEKKWSLKNGWYTTAGGDVSGRVYPGNKKFNDMTAGVSGGIGFADRRKDAGLAVFHERRTYGNDAYSYTNGARLYFNRWQTPKWQTLSSAEWGRLKNTRRARSDNTHLQISNSLVFYRNARQYWMGGLDFYRERNPADRGDNFNRYGLRFAWGQEWGGSGLSSLLRLGAAKRHYEKPGFFSGFKGERRRDKELNTSLSLWHRALHFKGITPRLTLSHRETRSNDVFNEYEKNRAFVEFNKTF

SEQ ID NO: 897 - protein, 322 aa, Neisseria
MKLTLAIPSLNLDEDEIRIPLCLHAFNKILQYGSLHRQSCTASAFYARYLWCGRLVERAAQSLNMPSEAVALATPVWQKMGMHQANVLTAEYLNVGTDEAERICRDLSAFYGDIPWRFVPVLPELWLVSLPCAYRWGAKPVLDLGGLLGADDQPDGEDALEWLRVQTEIQMWLAAHPVNHNRKKRGLPELNGLWLWDGTNGGAQGGTLFADTVWSRFHSDRRALPDNFRAYEETAAHLPDTHHILFMDDLRLTALTGDRERYAAILQQWEERWFAPIYEAVRTGKIKRLDITTDGQHGGTLTFKPADRWKFWRGAKTFDGIW

SEQ ID NO: 898 - protein, 430 aa, Neisseria
MAVFPLSAKHRKYALRALAVSIILVSAAYIASTERTERVRPQRVEQNLPPLSWGGSGVQTAYWVQEAVQPGDSLADVLARSGMARDEIARITEKYGGEADLRHLRADQSVHVLVGGDGGAREVQFFTDEDGERNLVALEKKGGIWRRSASEADMKVLPTLRSVVVKTSARGSLARAEVPVEIRESLSGIFAGRFSLDGLKEGDAVRLMYDSLYFHGQQVAAGDILAAEVVKGGTRHQAFYYRSDKEGGGGGNYYDEDGKVLQEKGGFNIEPLVYTRISSPFGYRMHPILHTWRLHTGIDYAAPQGTPVRASADGVITFKGRKGGYGNAVMIRHANGVETLYAHLSAFSQAEGNVRGGEVIGFVGSTGRSTGPHLHYEARINGQPVNPVSVALPTPELTQADKAAFAAQKQKADALLARLRGIPVTVSQSD

SEQ ID NO: 899 - protein, 228 aa, Neisseria; identical to SEQ ID NO: 131

SEQ ID NO: 900 - protein, 157 aa, Neisseria
MSRNNEELQGISLLGNQKTQYPTGYAPEILEAFDNKHPDNDYFVKFVCPEFTSLCPMTGQPDFATIYIRYIPHIKMVESKSLKLYLFSFRNHGDFHEDCVNIIMKDLIALMDPKYIEVFGEFTPRGGIAIHPFANYGKAGTEFETLARKRLFEHDAQ

SEQ ID NO: 901 - protein, 384 aa, Neisseria
MDTHTDETKLQNTQAKRKRRLTALTLLFALAAAAAGSAFFLWWQHEEETEDAYVAGRVVQVTPQKGGTVRKVLHDDTDAVKKGDVLAVLDDDNDVLAYERAKNELVQAVRQNRRQNAATSQAGAQVALRRADLARAQDDLRRRSALAESGAVSAEELAHARAAVSQAQAAVKAALAEESSARAALGGQVSLREQPAVQTAIGRLKDAWLNLQRTQIRAPADGQVAKRSVQVGQQVAAGAPLMAVVPLSDVWVDANFKETQLRHMKIGQPAELVSDLYGKQIVYRGRVAGFSAGTGSAFSLIPAQNATGNWIKVVQRVPVRIVLNREDVDRHPLRIGLSMTVKVDTSAAGAPVSKTPGAALPEMESTDWSEVDRTVDEILGQSAP

SEQ ID NO: 902 - protein, 508 aa, Neisseria
MDYPPLKGAALAWVTLSLGLAVFMEVLDTTIANVAVPVIAGNLGAATTQGTWVITSFSVANAVSVPLTGFLAKRIGEVKLFTAAAVGFVITSWLCGIAPNLQSLVVFRILQGFIAGPLIPLSQSLLMASYPPAKRTLALALWAMTVVVAPVLGPILGGWISGNWHWGWIFFINIPIGIISAWITWKHLKYRETETVKMPTDYVGLTLMVVGIGALQMMLDRGKELDWFASGEIITLGVVALVCLSYFIVWELGEKYPIVDLSLFKDRNFTVGVIATSLGFMVYMGTLTLLPLVLQTNLGYTSTWAGLAAAPVGILPVFLSPLIGRFGNKIDMRLFVTASFLTFAFTFYWRTDFYADMDIGNVIWPQFWQGVGVAMFFLPLTTITLSHMKGGQIAAAGSLSNFLRVLMGGVGVSVVSTLWERREALHHTRFAEHITPYSATLHETAAHLSQHGVSDIQTLGIINNTITQQGFIIGSNEIFMAGSLLFIIMIPVIWLAKPPFHNGGGGGH

SEQ ID NO: 903 - protein, 49 aa, Neisseria
MQQFPKSAIIAPHLFRTCKRSTDATIGRIIRAKQPFFFKTLELTLFFVV

SEQ ID NO: 904 - protein, 77 aa, Neisseria
MARVCKVTGKRPMSGNNVSHANNKTKRRFLPNLQSRRFWVESENRWVRLRVSNAALRTIDKVGIDVVLADLRARGEA

SEQ ID NO: 905 - protein, 51 aa, Neisseria
MRDKIKLESSAGTGHFYTTTKNKRTMPGKLEIKKFDPVARKHVVYKETKLK

SEQ ID NO: 906 - protein, 394 aa, Neisseria
MSLHSDILVVGAGPAGLSFAAELAGSGLKVTLIERSPLTVLQNPPYDGREIALTHFSREIMQRLGMWDKIPENEIYPLRDAKVLNGRSDYQLHFPQPTEARGEPADCLGYLISNHNIRRAAYEVVSQLDNVSILTDTVVKEVKTSDNEAQVILENGKILTARLLLAADSRFSQTRRQLGISSDMHDYSRTMFVCRMKHTLSNQHTAYECFHYGRTIALLPLEEHLTNTVITVDTDKINSVQNLSPEELAASVKEQLKGRLGDMELVSSIHHYPLVGMIAKRFYGKRSALIGDAAVGMHPVTAHGFNLGLSSADILAKLILEAEQRGQDIGASSLLEKYSSKHMLHAHPLYHGTNMMLKLFTNETAPAKLLRGLVLRASNNFPPLKKLITKQLTG

SEQ ID NO: 907 - protein, 90 aa, Neisseria
MASKKAGGSTRNGRDSEAKRLGVKAYGNELIPAGSIIVRQRGTKFHAGDNVGMGKDHTLFAKVDGYVEFKTKGALNRKTVSIRPYTGSEE

SEQ ID NO: 908 - protein, 102 aa, Neisseria
MYAVVKTGGKQYKVSVGEKLKVEQIPAELDSQIELTEVLMIADGESVKVGAPFIEGAKVTAKVVAHGRGEKVRIFKMRRRKHYQKRQGHRQNFTQIEIVAIA

SEQ ID NO: 909 - protein, 324 aa, Neisseria
MLENLPYFQRHLPEDLAKVNEVINRAVQSDVALISQIGTYIISAGGKRLRPIMTILAGKAVGYDDEKLYSLAAMVEFIHTSTLLHDDVVDESDLRRGRATANNLFGNAAAVLVGDFLYTRAFQLMVASGSMRVLEVMADATNIIAEGEVMQLMNIGNTDITEEQYIQVIQYKTAKLFEAAAQVGAILGKASPEHERALKDYGMYVGTAFQIIDDVLDYSGETEETGKNVGDDLAEGKPTLPLIYLMRQGSEQVANDVRTALENADRSYFEKIHDYVVRSDALAYSIGEARKAVDCAVTALDALPDSEVKDAMIQLAKESLVRVS

SEQ ID NO: 910 - protein, 34 aa, Neisseria
MLREVSDIRPFSVGGLFCHLKTFSSCLKNRPLGR

SEQ ID NO: 911 - protein, 558 aa, Neisseria
MSVGLLRILVQNQVVTVEQAEHYYNESQAGKEVLPMLFSDGVISPKSLAALIARVFSYSILDLRHYPRHRVLMGVLTEEQMVEFHCVPVFRRGDKVFFAVSDPTQMPQIQKTVSAAGIEVELVIVEDDQLAGLLDWVGSRSTSLLQELGEGQEEEESHTLYIDNEEAEDGPVPRFIHKTLSDALRSGASDIHFEFYEHNARIRFRVDGQLREVVQPPIAVRGQLASRIKVMSRLDISEKRIPQDGRMQLTFQKGGKPVDFRVSTLPTLFGEKVVMRILNSDAASLNIDQLGFEPFQKKLLLEAIHRPYGMVLVTGPTGSGKTVSLYTCLNILNTESVNIATAEDPAEINLPGINQVNVNDKQGLTFAAALKSFLRQDPDIIMVGEIRDLETADIAIKAAQTGHMVFSTLHTNNAPATLSRMLNMGVAPFNIASSVSLIMAQRLLRRLCSSCKQEVERPSASALKEVGFTDEDLAKDWKLYRAVGCDRCRGQGYKGRAGVYEVMPISEEMQRVIMNNGTEVDILDVAYKEGMVDLRRAGILKVMQGITSLEEVTANTND

SEQ ID NO: 912 - protein, 69 aa, Neisseria
MTESRQTRLQVKCPTCQTAVVWKPENAFRPFCSQRCKLIDLGGWADGKYTVSGQTESLPEISEPDMAYR

SEQ ID NO: 913 - protein, 210 aa, Neisseria
MTVWVGLTGGIGSGKSAAAQCFADLGVPRIDADAAAHSLTASDGIALPEIRRLFGDTVFDTQGLLRRDILRKEVFASPSRKALLESVMLPLIFSEIKKQQETFTDAAYGIVEIPLLTEKRQFISLIRRVLTISAPVEKRIGRVMARSGLTRGEVAAVISHQASESERLLLADDVLLNDGSLKSLREKTMRLHAFYSGIFASKPTQGKHND

SEQ ID NO: 914 - protein, 286 aa, Neisseria
MSDLSVLSPFAVPLAAVFGLLVGSFLNVVIYRVPVMMERGWTVFAKEYLNLPLTEEESRTFNLMKPDSCCPKCRVPIRAWQNIPIVSYLLLRGKCASCQTKISIRYPLIELLTGVLFGLVAWQYGWSWITLGGLVLTAFLISLTFIDADTQYLPDSMTLPLIWLGLIFNLDGGFVPLQSAVLGAVAGYGSLWLLCAVYKLLTGKTGMGNGDFKLIAALGAWLGISALPVLIFVSSLIGLVAAIVMRVAKGQHFAFGPALTVSGWIIFTANDSVWRAVNWWLTHPVL

SEQ ID NO: 915 - protein, 410 aa, Neisseria
MAKNGGFSLFAKKEKRFIFEGRHSASDKLVNGEVSAFTEEEARKKLAKRGIRPLQITRVKTSSKRKITQEDITVFTRQLSTMIKAGLPLMQAFEIVARGHGNPSMTEMLMEIRGEVEQGSSLSRAFSNHPKYFDRFYCNLVAAGETGGVLESLLDKLAIYKEKTQAIRKKVKTALTYPVSVIAVAIGLVFVMMIFVLPAFKEVYANMGAELPALTQTVMDMSDFFVSYGWMVLIALGFAIYGFLKLKARSIKIQRRMDAILLRMPIFGDIVRKGTIARWGRTTATLIAAGVPLVDVLDSTAGAAGNLIYEEATREIRTRVIQGLSMTSGMRATELFPNMMLQMSSIGEESGSLDDMLNKAAEFYEDEVDNAVGRLSAMMEPIIIVILGLVIGTLLVAMYLPLFNLGNVVA

SEQ ID NO: 916 - protein, 547 aa, Neisseria
MNAFTRAWYALERHYQDTRHVLLRDRFACEPDRFERMHERLDGMLFDYSKNRLGEDTLQLLCNLADAADLEGKMRALRTGAKVNGSEGRAALHTALRLPDGADAVYVDGRDVLPEIRRELNRALKFAHSLDDGSYQGITGKRITDFVHIGIGGSDLGPAMCVQALEPFRRHITVHFAANADPACLDAVLCRLNPETTVFCVASKSFKTPETLLNAQAVKAWYRGAGFSESETACHFCAVSADTAAAAAFGIAAERVFAMYDWVGGRYSVWSPVGLPVMVAVGGARFRELLAGAHAMDRHFFSTPTRHNIPVLMALIAVWYNNFQHADGQTAVPYSHNLRLLPAWLNQLDMESLGKSRASDGSPAVCKTGGIVFGGEGVNCQHAYFQLLHQGTRLIPCDFIVPMTAQGREDGRSRFTVANAFAQAEALMKGKTLDEARAELADLPEAERERLAPHKEFPGNRPSNSILIDRLTPYNLGMLMAAYEHKTFVQGAIWNVNPFDQWGVEYGKQLAKTIIGELEGGTSVHDASTEGLMAFYRECRLKGGGAA

SEQ ID NO: 917 - protein, 273 aa, Neisseria
MSLQNIIETAFENRADITPTTVTPEVKEAVLETIRQLDSGKLRVAERLGVGEWKVNEWAKKAVLLSFRIQDNEVLNDGVNKYFDKVPTKFADWSEDEFKNAGFRAVPGAVARRGSFVAKNVVLMPSYVNIGAYVDEGAMVDTWATVGSCAQIGKNVHLSGGVGIGGVLEPLQAAPTIIEDNCFIGARSEIVEGVIVEEGSVISMGVFIGQSTKIFDRTTGEIYQGRVPAGSVVVSGSMPSKDGSHSLYCAVIVKRVDAQTRAKTSVNELLRGI

SEQ ID NO: 918 - protein, 261 aa, Neisseria
MGFLQGKKILITGMISERSIAYGIAKACREQGAELAFTYVVDKLEERVRKMAAELDSELVFRCDVASDDEINQVFADLGKHWDGLDGLVHSIGFAPKEALSGDFLDSISREAFNTAHEISAYSLPALAKAARPMMRGRNSAIVALSYLGAVRAIPNYNVMGMAKASLEAGIRFTAACLGKEGIRCNGISAGPIKTLAASGIADFGKLLGHVAAHNPLRRNVTIEEVGNTAAFLLSDLSSGITGEITYVDGGYSINALSTEG

SEQ ID NO: 919 - protein, 332 aa, Neisseria
MSRPVPAVFGSVFHSQMPVLAYREGKWQPTEWQSSQDLSLAPGAHALHYGSECFEGLKAFRQADGKIVLFRPTANIARMRQSADILHLPRPETEAYLDALIKLVKRAADEIPDAPAALYLRPTLIGTDPVIGKAGSPSETALLYILASPVGDYFKVGSPVKILVETEHIRCAPHMGRVKCGGNYASAMHWVLKAKAEYGANQVLFCPNGDVQETGASNFILINGDEIITKPLTDEFLHGVTRDSVLTVAKDLGYTVSERNFTVDELKAAVENGAEAILTGTAAVISPVTSFVIGGKEIEVKSQERGYAIRKAITDIQYGLAEDKYGWLVEVC

SEQ ID NO: 920 - protein, 160 aa, Neisseria
MERNGVFGKIVGNRILRMSSEHAAASYPKPCKSFKLAQSWFRVRSCLGGVFIYGANMKLIYTVIKIIILLLFLLLAVINTDAVTFSYLPGQKFDLPLIVVLFGAFVVGIIFGMFALFGRLLSLRGENGRLRAEVKKNARLTGKELTAPPAQNAPESTKQP

SEQ ID NO: 921 - protein, 389 aa, Neisseria
MDNELWIILLPIILLPVFFAMGWFAARVDMKTVLKQAKSIPSGFYKSLDALVDRNSGRAARELAEVVDGRPQSYDLNLTLGKLYRQRGENDKAINIHRTMLDSPDTVGEKRARVLFELAQNYQSAGLVDRAEQIFLGLQDGKMAREARQHLLNIYQQDRDWEKAVETARLLSHDDQTYQFEIAQFYCELAQAALFKSNFDVARFNVGKALEANKKCTRANMILGDIEHRQGNFPAAVEAYAAIEQQNHAYLSMVGEKLYEAYAAQGKPEEGLNRLTGYMQTFPELDLINVVYEKSLLLKCEKEAAQTAVELVRRKPDLNGVYRLLGLKLSDMNPAWKADADMMRSVIGRQLQRSVMYRCRNCHFKSQVFFWHCPACNKWQTFTPNKIEV

SEQ ID NO: 922 - protein, 138 aa, Neisseria
MRLLHTMLRVGNLEKSLDFYQNVLGMKLLRRKDYPEGRFTLAFVGYGDETDSTVLELTHNWDTERYDLGNAYGHIAVEVDDAYEACERVKRQGGNVVREAGPMKHGTTVIAFVEDPDGYKIEFIQKKSGDDSVAYQTA

SEQ ID NO: 923 - protein, 875 aa, Neisseria
MPAGRLPRRCPMMTKFTDCTRSNRIQPPTHRGYILKNNRQIKLIAASVAVAASFQAHAGLGGLNIQSNLDEPFSGSITVTGEEAKALLGGGSVTVSEKGLTAKVHKLGDKAVIAVSSEQAVRDPVLVFRIGAGAQVREYTAILDPVGYSPKTKSALSDGKTHRKTAPTAESQENQNAKALRKTDKKDSANAAVKPAYNGKTHTVRKGETVKQIAAAIRPKHLTLEQVADALLKANPNVSAHGRLRAGSVLHIPNLNRIKAEQPKPQTAKPKAETASMPSEPSKQATVEKPVEKPEAKVAAPEAKAEKPAVRPEPVPAANTAASETAAESAPQEAAASAIDTPTDETGNAVSEPVEQVSAEEETESGLFDGLFGGSYTLLLAGGGAALIALLLLLRLAQSKRARRTEESVPEEEPDLDDAADDGIEITFAEVETPATPEPAPKNDVNDTLALDGESEEELSAKQTFDVETDTPSNRIDLDFDSLAAAQNGILSGALTQDEETQKRADADWNAIESTDSVYEPETFNPYNPVEIVIDTPEPESVAQTAENKPETVDTDFSDNLPSNNHIGTEETASAKPASPSGLAGFLKASSPETILEKTVAEVQTPEELHDFLKVYETDAVAETAPETPDFNAAADDLSALLQPAEAPSVEENITETVAETPDFNATADDLSALLQPSKVPAVEENAAETVADDLSALLQPAEAPAVEENVTETVAETPDFNATADDLSALLQPSEAPAVEENAAETVADDLSALLQPAEAPAVEENAAEITLETPDSNTSEADALPDFLKDGEEETVDWSIYLSEENIPNNADTSFPSESVGSDAPSEAKYDLAEMYLEIGDRDAAAETVQKLLEEAEGDVLKRAQALAQELGI

SEQ ID NO: 924 - protein, 176 aa, Neisseria
MKFVSDLLSVILFFATYTVTKNMIAATAVALVAGVVQAAFLYWKYKKLDTMQWVGLVLIVVFGGATIVLGDSRFIMWKPSVLFWLGALFLWGSHLAGKNGLKASIGREIQLPDAVWAKLTYMWVGFLIFMGIANWFVFTRFESQWVNYKMFGSTALMLVFFIIQGIYLSTCLKKED

SEQ ID NO: 925 - protein, 92 aa, Neisseria
MLLATDGEDVHEARMAARPEHLKRLETLKSEGRLLTAGPNPLPEDSNRVSGSLIVAQFESLDAAQAWAEDDPYVHAGVYSEVLIKPFKAVFK

SEQ ID NO: 926 - protein, 92 aa, Neisseria
MPAVDLIRERLQTLDPLVLEIGDESHLHKGHAGNTGGGHYAVLVVSGRFEGVSRLNRQKTVKSLLKDLFSGGMIHALGIRAATPDEYFHTAD

SEQ ID NO: 927 - protein, 288 aa, Neisseria
MKAKILTSVALLACSGSLFAQTLATVNGQKIDSSVIDAQVAAFRAENSRAEDTPQLRQSLLENEVVNTVVAQEVKRLKLDRSAEFKNALAKLRAEAKKSGDDKKPSFKTVWQAVKYGLNGEAYALHIAKTQPVSEQEVKAAYDNISGFYKGTQEVQLGEILTDKEENAKKAVADLKAKKGFDAVLKQYSLNDRTKQTGAPVGYVPLKDLEQGVPPLYQAIKDLKKGEFTATPLKNGDFYGVYYVNDSREVKVPSFDEMKGQIAGNLQAERIDRAVGALLGKANIKPAK

SEQ ID NO: 928 - protein, 252 aa, Neisseria; identical to SEQ ID NO: 149

SEQ ID NO: 929 - protein, 163 aa, Neisseria
MRAVIQKTVGAKVDVVSEAGTETCGKIDGGFVVLLGVTHSDTEKDARYIADKIAHLRVFEDEAGKLNLSLKDVGGAVLLVSQFTLYADAASGRRPSFSQAAPAEQAQQLYLRTAELLRGHGIHVETGRFRTHMQVSLCNDGPVTILLDSFMTRISPKMKVVPD

SEQ ID NO: 930 - protein, 336 aa, Neisseria
MNDNTHTLPPRHLSVAPMLDWTDRHYRYLARQITRNTWLYSEMVNAGAIVYGDKDRFLMFNEGEQPVALQLGGSDPSDLAKAAKAAEAYGYNEVNLNCGCPSPRVQKGSFGACLMNEVGLVADCLNAMQDAVKIPVTVKHRIGVDRQTEYQTVADFVGTLRDKTACKTFIVHARNAWLDGLSPKENRDVPPLKYDYVYRLKQEFPGLEIIINGGITTNEAIAGHLQHVDGVMVGREAYHNPMVMREWDRLFYGDTRSPIEYADLVQRLYTYSQAQIQAGRGTILRHIVRHSLGLMHGLKGARTWRRMLSDATLLKDNDGSLILEAWKEVERANMRE

SEQ ID NO: 931 - protein, 295 aa, Neisseria
MYTGRFAPSPTGLLHIGSLLTAVASYADARAHGGKWLIRMEDLDPPREMPGAASHILHTLEAFGFEWDGEVAYQSRRYALYEETLCRLKTAGLVYPCHCSRKDWQAGARRGADGFVYNGRCRHPGQRPALQGKQPAWRIRVPDRIIGFSDGIVGGYAQNLARDIGDFVLLRADGYWAYQLAVVADDAEQGVTHIVRGQDLLVSTPRQIYLQQCLDVPTPQYAHLPLLTNAQGQKWSKQTLAPALDLNRREQLLRQVFRYLKLPEAPETDRPAELLDWAVAHWDMDKVPKHAVTAP

SEQ ID NO: 932 - protein, 150 aa, Neisseria
MAKAIEIISPNEIYSDLIFKDPVPPHTIEYKMINLELKAINLYDCAFEDFVPEIKDNFCVGIDLDIGTDDSDAADIFSVRICSPKWILHNCFQNQRVKWGAGMMIMNEFNHSVIKSEIEKILKECSKETWEKSLTYLLRFFSWEFEDYQC

SEQ ID NO: 933 - protein, 351 aa, Neisseria
MTILSDVKALGQQIWLDNLSRSLVQSGELAQMLKQGVCGVTSNPAIFQKAFAGDALYADEIAALKQQNLSPKQRYETMAVADVRAACDVCLAEHESTGGKTGFVSLEVSPELSKDAQGTVEEARRLYAAIGCKNAMIKVPATDAGIDALETLVSDGISVNLTLLFSRAQTLKAYAAYARGIAKRLAAGQSVAHIQVVASFFISRVDGALDTTLPDHLKGKIAIALAKAAYQDWAQYFGSPEFAALETKGANRVQLLWASTGVKNPAYPDTLYVDSLIGAHTVNTVPDATLKAFIDHGTAKATLTEGVEEAQAQLAETAALGIDVETLATRLQEDGLKQFEEAFEKLLAPLA

SEQ ID NO: 934 - protein, 324 aa, Neisseria
MAENGKYLDWAREVLHAEAEGLREIAAELDKNFVLAADALLHCKGRVVITGMGKSGHIGRKMAATMASTGTPAFFVHPAEAAHGDLGMIVDNDVVVAISNSGESDEIAAIIPALKRKDITLVCITARPDSTMARHADIHITASVSKEACPLGLAPTTSTTAVMALGDALAVVLLRARAFTPDDFALSHPAGSLGKRLLLRVADIMHKGGGLPAVRLGTPLKEAIVSMSEKGLGMLAVTDGQGRLKGVFTDGDLRRLFQECDNFTGLSIDEVMHTHPKTISAERLATEALKVMQANHVNGLLVTDADGVLIGALNMHDLLAARIV

SEQ ID NO: 935 - protein, 178 aa, Neisseria
MQAISPELQARAAKIKLLILDVDGVLTDGRIFIRDNGEEIKSFHTLDGHGLKMLQASGVQTAIITGRDAPSVGIRVKQLGINYYFKGISDKRAAYEELRAQAGVEEAECAFVGDDVVDLPVMVRCGLPVAVPGAHWFTRQHAAYITEHAGGAGAVREVCDLIMQAQGTLGAALNEYIK

SEQ ID NO: 936 - protein, 193 aa, Neisseria
MKVRWRYGIAFPLILAVALGSLSAWLGRISEVEIEEVRLNPDEPQYTMDGLDGRRFDEQGYLKEHLSAKGAKQFPESSDIHFDSPHLVFFQEGRLLYEVGSDEAVYHTENKQVLFKNNVVLTKTADGKRQAGKVEAEKLHVDTESQYAQTDTPVSFQYGASHGQAGGMTYDHKTGMLNFSSKVKATIYDTKDM

SEQ ID NO: 937 - protein, 176 aa, Neisseria
MIQKICKLFVLIAFFSASPAFALQSDSRQPIQIEADQGSLDQANQSTTFSGNVVIRQGTLNISAARVNVTRGGKGGESVRAEGSPVRFSQTLDGGKGTVRGQANNVAYSSAGSTVVLTGNAKVQRGGDVAEGAVITYNTKTEVYTISGSTKSGAKSASKSGRVSVVIQPSSTQKSE

SEQ ID NO: 938 - protein, 254 aa, Neisseria
MPTEDIEEIFMSANVSRLVVQNLQKSFKKRQVVKSFSLEIESGEVIGLLGPNGAGKTTSFYMIVGLIAADAGSVTLDGQELRHLPIHERARLGVGYLPQEASIFRKMTVEQNIRAILEIRTKDKNQIDREIEKLLADLNIGHLRRSPAPSLSGGERRRVEIARVLAMKPHFILLDEPFAGVDPIAVIDIQKIIGFLKSRGIGVLITDHNVRETLSICDRAYIISDGTVLASGKPDDLVGNEQVRSVYLGKNFKY

SEQ ID NO: 939 - protein, 233 aa, Neisseria
MFRIIKWLIALPVGIFIFFNAYVYGNIITYRAVAPHRTAFMSMRMKQFEQEGRDVALDYRWMPYKRISTNLKKALIASEDARFAGHGGFDWGGIQNAIRRNRNSGKVKAGGSTISQQLAKNLFLNESRSYIRKGEEAAITAMMEAVTDKDRIFELYLNSIEWHYGVFGAEAASRYFYQIPAAKLTKQQAAKLTARVPAPLYYADHPKSKRLRNKTNIVLKRMGSAELPESDTD

SEQ ID NO: 940 - protein, 269 aa, Neisseria
MTALPRYAVFGNPVAHSKSPQIHQQFALQEGVDIEYERICADIGGFAQAVSTFFETGGCGANVTVPFKQEAFHLADEHSERALAAGAVNTLIPLKNGKLRGDNTDGIGLTNDITQVKNIAIEGKTILLLGAGGAVRGVIPVLKEHRPARIVIANRTRAKAEELAQLFGIEAVPMADVNGGFDIIINGTSGGLNGQIPDIPPDIFQNCALAYDMVYGCAAKPFLDFARQSGAKKTADGLGMLVGQAAASYALWRGFTPDIRPVIEYMKAL

SEQ ID NO: 941 - protein, 472 aa, Neisseria
MSIKNAVKLIEESEARFVDLRFTDTKGKQHHFTVPARIVLEDPEEWFENGQAFDGSSIGGWKGIQASDMQLRPDASTAFVDPFYDDATVVLTCDVIDPADGQGYDRDPRSIARRAEAYLKSSGIGETAYFGPEPEFFVFDGIEFETDMHKTRYEITSESGAWASGLHMDGQNTGHRPTVKGGYAPVAPIDCGQDLRSAMVNILEELGIEVEVHHSEVGTGSQMEIGTRFATLVKRADQTQDMKYVIQNVAHNFGKTATFMPKPIMGDNGSGMHVHQSIWKDGQNLFAGDGYAGLSDTALYYIGGIIKHAKALNAITNPSTNSYKRLVPHFEAPTKLAYSAKNRSASIRIPSVNSSKARRIEARFPDPTANPYLAFAALLMAGLDGIQNKIHPGDPADKNLYDLPPEEDALVPTVCASLEEALAALKADHEFLLRGGVFSKDWIDSYIAFKEEDVRRIRMAPHPLEFEMYYSL

SEQ ID NO: 942 - protein, 427 aa, Neisseria
MTASKSGFIGQIFSRNMLVCIFTGFTSGLPLYFLINLIPAWLRSEQVDLKSIGLMALIGLPFTWKFLWSPLMDAVRLPVLGRRRGWMLLTQAGLLAALAVYAFLNPRNHLPLIAGLSVLVAFFSASQDIVLDAFRREILSDEELGLGNSVHVNAYRIAALIPGSLSLVLADRMPWLEVFVITSLFMLPGLLMTLFLAREPVLPPAVPKTLKQTVVEPFKEFFTRKGIASAVCVLLFIFLYKLGDSMATALATPFYLDMGFSKTDIGLIAKNAGLWPAVAAGILGGVWMLKIGVNKALWLFGAVQAVTVLGFVWLAGFGPFDTVGTGERLMLAAVIGAEAVGVGLGTAAFVSYMARETNPAFTATQLALFTSLSAVPRTVINSFAGYLIEWLGYVPFFQLCFALALPGMLLLLKVAPWNGEKTQDAGR

SEQ ID NO: 943 - protein, 91 aa, Neisseria
MNASNWSVYLILCENSAFYCGISPNPQQRLAAHTTGKGAKYTRVFKPVAMRIVAGGMDKGTALRQEIAVKKLTAAQKRQLWEQAEKMPSET

SEQ ID NO: 944 - protein, 26 aa, Neisseria
MKVKAYISIFYTPTEKNTMNCLLDLY

SEQ ID NO: 945 - protein, 45 aa, Neisseria
MKRLRAEIYADALSFPYILCVVKVQAALKSVLPSMNHHFVLFQRA

SEQ ID NO: 946 - protein, 257 aa, Neisseria
MRPYATTIYQLFILFIGSVFTMTSCEPVNEQTSFNNPEPMTGFEHTVTFDFQGTKMVIPYGYLARYTQNNATKWLSDTPGQDAYSINLIEISVYYKKTDQGWVLEPYNQQNKAHFIQFLRDGLDSVDDIVIRKDACSLSTTMGERLLTYGVKKMPSAYPEYEAYEDKRHIPENPYFHEFYYIKKGENPAIITHRNNRINQTEEDSYSTSVGSCINGFTVRYYPFIREKQQLTQQELVGYHQQVEQLVQSFVNNSSKK

SEQ ID NO: 947 - protein, 91 aa, Neisseria
MNEGEVVLTPEQIQTLRGYASRGDTYGGWRYLANLGDRYADDAAAIVGKDANLNGLNLWMKKGVENLWDDTVGKKTRLMCISVFWIVVFNL

SEQ ID NO: 948 - protein, 377 aa, Neisseria
MFKKFKPVLLSFFALVFAFWLGTGIAYEINPRWFLSDTATEVPKNPNAFVAKLARLFRNADRAVVIVKESIRTEENLAGTVDDGPLQSEKDYLALAIRLSRLKEKAKWFHVTEQEHGKEVWLDYHIGEGGLVAVSLSQRSPEAFVNAEYLYRNDRPFSVNVYGGTVHGENYETTGEYRVVWQPDGSVFDAAGRGKIGEDVYEHCLGCYQMAQVYLAKYRDVANDEQKVWDFRKESNRIASDSRNSVFYQNMRELMPRGMKANSLVVGYDADGLPQKVYWSFDNGKKRQSFEYYLKNGNLFIAQSSTVALKADGVTADMQTYHAQQTWYLDGGRIVREEKQGDRLPDFPLNLENLEKEVRRYAEAAARRSGGRRDLSH

SEQ ID NO: 949 - protein, 128 aa, Neisseria
MCIMCELKNFRRNITCFEGYDENSFIGKWYDDGVWDDEEYWKLENDLIEVRKKYPYPMDIPRYVVIGIGTIIDFLMVPNWKLFEIKASPWLPDSVGINERYERLKTMLRYIFTEKDIVNVQFDYYNKK

SEQ ID NO: 950 - protein, 152 aa, Neisseria
MVDAVVKTPEFLPFTSVGIFRFGADITQYKNILETFMYEPPDEFRTEYYESPDSNLLISVKKKNKIISIFCYQELYFMGVNIIGLNFEDFKQLFHYPKSYGVDKYYLSNESYPTYVYEFDEIGVQAWEAKGKIVTIIAGGKDNYSTEPYYDE

SEQ ID NO: 951 - protein, 129 aa, Neisseria
MKAGSRLLSESGRTQTVRKTVVKPKPLKAYNLTVADWHTYFVKGNQAETEGVWVHNSCPPKRTGSSKNEKHGDGGRSQISAESKIAELTNKIIPGMSKNERLKIKQKIRNIAKNANRKTKGEEHGRRGR

SEQ ID NO: 952 - protein, 125 aa, Neisseria
MCEFKDIIRNVPYFEGYDENSFIGKWYDDGVWDDEEYWKLENDLIEVRKKYPYPMDIPRYVVIGIGTIIDFLMVPNWKLFEIKASPWLPDSVGIHERYERFTTMLRYIFTEKDIVNVRFDYYNKK

SEQ ID NO: 953 - protein, 135 aa, Neisseria
MCEFKDFRRNIPCFKEYDENSFIGKWYDDGVWDDEEYWKLENDLIEVRKKYPYPMDIPRDIVIGIGTIIDFLMVQNWKLFEIKASTWLPKSVKINERYERFRVMLRYIFTDLDVEDWKFFYFPIQHSKGRLRRKV

SEQ ID NO: 954 - protein, 225 aa, Neisseria
MVKTADGYKAIARIRTGDRVFAKDEASGKTGYKPVTARYGNPYQETVYIEISDGIGNNQTLISNKIHPFYSQGKWIQAGRLKKGDTLLSESGAKQTVQNITLKQQPLKAYNLTVADWHTYFVKGNRAETEGVWVHNDCPPRKTPSTPIYGNDSEAYAAAKELGYRKIKERTRNDAAIFKKGKSYISRDVDSHNGGAWKEASSPEKLNRKETRNGTFDKNLNRIGD

SEQ ID NO: 955 - protein, 119 aa, Neisseria
MASYVSIKGWIECSDDDIKIIQENINNFWNNCPFNIEEKESAKIYKSGWVFPTNSFNWSSYIFFGACVKSYFIIYFEKCIKTIMELDIEISGFFELDYYEDNYKVNWKINNGNLIQTTN

SEQ ID NO: 956 - protein, 467 aa, Neisseria
MKPLRRLTNLLAACAVAAAALIQPALAADLAQDPFITDNAQRQHYEPGGKYHLFGDPRGSVSDRTGKINVIQDYTHQMGNLLIQQANINGTIGYHTRFSGHGHEEHAPFDNHAADSASEEKGNVDEGFTVYRLNWEGHEHHPADAYDGPKGGNYPKPTGARDEYTYHVNGTARSIKLNPTDTRSIRQRISDNYSNLGSNFSDRADEANRKMFEHNAKLDRWGNSMEFINGVAAGALNPFISAGEALGIGDILYGTRYAIDKAAMRNIAPLPAEGKFAVIGGLGSVAGFEKNTREAVDRWIQENPNAAETVEAVFNVAAAAKVAKLAKAAKPGKAAVSGDFADSYKKKLALSDSARQLYQNAKYREALDIHYEDLIRRKTDGSSKFINGREIDAVTNDALIQAKRTISAIDKPKNFLNQKNRKQIKATIEAANQQGKRAEFWFKYGVHSQVKSYIESKGGIVKTGLGD

SEQ ID NO: 957 - protein, 313 aa, Neisseria; identical to SEQ ID NO: 157

SEQ ID NO: 958 - protein, 38 aa, Neisseria
MPSESHFRRSDGIFAPFVYKPLKSLYTQNPFNIKQTPL

SEQ ID NO: 959 - protein, 376 aa, Neisseria
MAFCTSLGVMMETQLYIGIMSGTSMDGADAVLIRMDGGKWLGAEGHAFTPYPGRLRRQLLDLQDTGADELHRSRILSQELSRLYAQTAAELLCSQNLAPSDITALGCHGQTVRHAPEHGYSIQLADLPLLAERTRIFTVGDFRSRDLAAGGQGAPLVPAFHEALFRDNRETRAVLNIGGIANISVLPPDAPAFGFDTGPGNMLMDAWTQAHWQLPYDKNGAKAAQGNILPQLLDRLLAHPYFAQPHPKSTGRELFALNWLETYLDGGENRYDVLRTLSRFTAQTVCDAVSHAAADARQMYICGGGIRNPVLMADLAECFGTRVSLHSTADLNLDPQWVEAAAFAWLAACWINRIPGSPHKATGASKPCILGAGYYY

SEQ ID NO: 960 - protein, 524 aa, Neisseria
MAQIQMSANVKTINAVFAAMLVGTVGYFIYWGLGYTHYNYAALFIIATMFGVFMAFNIGGNDVANSFGTSVGAGTLTIPQALLIAAVFEVSGAVIAGGEVTNTIRKGIVDLKGVDFEPIQFVFIMMSALLAAALWLLFASKKGLPVSTTHSIIGGIVGSAVCMAVMNDAASGDLIRWGKLGGIGVSWVLSPVLGGAVSYFLFSRVKKNVLDYNAWAEGTLKGIKQEKKAYKERHRLFFEGLSEAEKVEYATKMAHDAQIYDEPEFDPQELQSEYYRGLYAFDNRKNNVDSYKALHSWIPFIASFGAMMISAMLIFKGLKNLHLGMSNVNSFLTIFMIGAAVWMGTFVFAKSLKRKDLGKSTFQMFSWMQVFTACGFAFSHGANDIANAIGPFAAIMDVLRTNSVAAQNVVPPIAMLTFGIALIVGLWFVGKEVIKTVGTSLAEMHPASGFTAELSAASVVMGASLMGLPVSSTHILVGAVLGIGLVNRNANWKLMKPIGLAWVITLPAAAVLSVVCYLVLQAVF

SEQ ID NO: 961 - protein, 473 aa, Neisseria
MKIIQIQNNHNVNDDRPEFDRALIASLPASGPRYTSYPTADRFHDGFREGEYIKALHLRGMGALNKPLSLYIHIPFCNTICYYCGCNKIITKDKSRADAYIEYLEKEMELLAPHLNGRHQLAQLHFGGGTPTFLSDEQIERVFRMIRKHFELIPTGEYSIEIDPRKVSRDTVLMLGRLGFNRMSIGIQDFDPKVQAAVNRIQSYEETKEVIDAAREAGFKSVSVDLIYGLPHQTSESIKTTIDTVLSLDPDRLALYHYAHLPHVFKPQRRIDTAAVPDSEEKLDMLQYCVQTLTERGYVFIGMDHFAKPDDELSIALKEGFLQRNFQGYSTYADCDLVAIGVSSIGKIGSTYSQNERDIDAYYAAIDEGRLPIMRGYQLNQDDILRRNIIQDLMCRFALDYRIYESMFGIPFDRYFKDELADLEKLAGLGLVRLNSHGLTVTPKGRFLIRNIAMVFDYHLRHKETKAKYSQTV

SEQ ID NO: 962 - protein, 244 aa, Neisseria
MASHNTTHQMKTLCSSCSLRELCLPVGLLPNELSQLDAVIRQSRRLKKGEYLFCVGEAFTSLFAIRSGFFKTTVASQDGRDQVTGFFMSGELIGMDGICSHVHSCDAVALEDSEVCELPFTHIEELGQNIPSLRTHFFRMMSREIVRDQGVMLLLGNMRAEERIAAFLLNLSQRLYSRGFAANDFILRMSREEIGSYLGLKLETVSRTLSKFHQEGLISVEHKHIKILNLQVLKKMVSGCSHAI

SEQ ID NO: 963 - protein, 316 aa, Neisseria
MKLQQLKYALEVYQHNLNVSEAAEALFTSQPGISKQIKLLEEEIGIQIFIRSGKRVVSVSQPGKVVLDIAERILRDVQNIKNIGSEFTGQDSGSLTVATTHTQARYALPLIVADFVKRYPKVNLTIKQGSPAAIARMVTSGEADLAIVTERIDDHPELGKLPCYDWTHAVIVPNDHPLLECRNPLRIEDLARFPLITYEFAFNAGSSIARAFSKARLEQPDVALAAADTDVLKTYVRLGLGVGLMAKMAYNPDTDGDLQLVDAAHLFEPSPTWIALRSDTYLRGYAYDFIQAFAPHLTREKVDRILYTPISEDFSI

SEQ ID NO: 964 - protein, 242 aa, Neisseria
MTKQLKLSALFVALLASGTAVAGEASVQGYTVSGQSNEIVRNNYGECWKNAYFDKASQGRVECGDAVAAPEPEPEPEPAPAPVVVVEQAPQYVDETISLSAKTLFGFDKDSLRAEAQDNLKVLAQRLSRTNVQSVRVEGHTDFMGSDKYNQALSERRAYVVANNLVSNGVPVSRISAVGLGESQAQMTQVCEAEVAKLGAKVSKAKKREALIACIEPDRRVDVKIRSIVTRQVVPAHNHHQH

SEQ ID NO: 965 - protein, 75 aa, Neisseria
MHEVSGFCTRYCCNIRETSVGIDDVKQTPAFAGFVFLGGFLKRLSSESGCRFGFGFRFRFRFRFRFRFVSHCRAL

SEQ ID NO: 966 - protein, 98 aa, Neisseria
MDGIVPDVCGTVCRIWFYHQPFSVETPSVAAIEPNRWRKLPLCIRGGVQCGALICRLCVETGWSVHTGTVWPKLKVKYAETLNEPLYCLYGLCCLAMI

SEQ ID NO: 967 - protein, 318 aa, Neisseria
MKEFDFIKRYLQTGTDNDVVLGIGDDAAIVRPREGFDLCFSADMLLKDRHFFADVKPEDLAWKVLAVNISDMAAMGAIPRWVLLSAALPELDEVWLKRFCGSFFGLAKKFGVTLIGGDTTKGDMAFNVTIIGELPKGRALRRDAAVAGDDIWVSGRIGMAAAALNCRLKRCVLPDEVFAECEQKLLHPEPRVGLGLALLPFARAAQDVSDGLAQDLGHILTASGKGAEIWADSLPSLSVLKDILPRAQWLSYTLAGGDDYELVFTAPESCRSRVFDAAERCGVPVTRIGKINGGCRLKVLDADGRELELHSLGFDHFG

SEQ ID NO: 968 - protein, 161 aa, Neisseria
MADFKPDFAWLLKRPLCFLAFGFGSGLAPFAPGTFGTLAALPLAFVLILLGIDGLLLAFLCIVLFMWGIRICAYAERETGVSDHGGIVWDEIVAMLFVLAFVPFRWTWWLAAFVLFRLFDALKPSPVGWFDKNLHGGLGIMADDMAAAVMTLIVLRIAMLF

SEQ ID NO: 969 - protein, 558 aa, Neisseria
MSQQYVYSMLRVSKVVPPQKTIIKDISLSFFPGAKIGLLGLNGAGKSTVLRIMAGVDKEFEGEAVPMGGIKIGYLPQEPELDPEKTVREEVESGLGEVAAAQKRLEEVYAEYANPDADFDALAEEQGRLEAIIAAGSSTGGGAEHELEIAADALRLPEWDAKIDNLSGGEKRRVALCKLLLSKPDMLLLDEPTNHLDAESVEWLEQFLVRFPGTVVAVTHDRYFLDNAAEWILELDRGHGIPWKGNYSSWLEQKEKRLENEAKSEAARVKAMKQELEWVRQNAKGRQAKSKARLARFEEMSNYEYQKRNETQEIFIPVAERLGNEVIEFVNVSKSFGDKVLIDDLSFKVPAGAIVGIIGPNGAGKSTLFKMISGKEQPDSGEVKIGQTVKMSLIDQSREGLQNDKTVFDNIAEGRDILQVGQFEIPARQYLGRFNFKGSDQSKIAGQLSGGERGRLHLAKTLLSGGNVLLLDEPSNDLDVETLRALEDALLEFAGSVMVISHDRWFLDRIATHILACEGDSKWVFFDGNYQEYEADKKRRLGEEGAKPKRIKYKPVTR

SEQ ID NO: 970 - protein, 451 aa, Neisseria; identical to SEQ ID NO: 75

SEQ ID NO: 971 - protein, 336 aa, Neisseria
MSDTPATRDFGLIDGRAVTGYVLSNRRGTRVCVLDLGGIVQEFSVLADGVRENLVVSFDDAASYADNPFQINKQIGRVAGRIRGAAFDINGRTYRVEANEGRNALHGGSHGLAVTRFNAVAADGRSVVLRSRLQQSADGYPNDLDLDISYRLDEDDRLTVSYRATALGDTVFDPTLHIYWRLDAGLHDAVLHIPQGGHMPADAEKLPVSTVSDDLEVFDFSRPKPLDAAVAALRRETGRAGFDDAYRVPSDIGRPAAVLQAGRRRRISIYSDRNGLVIFTAAPQDFARHDAGVYDALATEAQTLPDSLNWPEFGNIRLNKGDTREATIAYGIESLS

SEQ ID NO: 972 - protein, 752 aa, Neisseria
MYTRIMEISPWTLRSAKLEKEHKRLQESLTSLGNGYMGMRGSFEETYSADSHLGTYIAGVWFPDKTRVGWWKNGYPKYFGKAINAFNFSKVKIFVDGQEVDLAKNDVAGFSVELDMQHGVLRRSFTVFGVRFNVCKFLSVAQKELAVIRWEAVSVDGKTHQVRIDSIIDADVKNEDSNYEEKFWQVLDKGVSDSLSYIAAQTVANPFGVEQFIVNAEQTFAGSFKALGGSQTDWQVSNSFESEVGSTPETFEKRVIVTTSRDYQSLEAVKAAGRALSEKIAGVAFETLLDAHKAGWLHRWEIADVVIEGSDEAQQGIRFNLFQLFSTYYGEDARLNIGPKGFTGEKYGGATYWDTEAYAVPLYLALAEPEVTRNLLQYRRNQLPQAQHNAREQGLAGALYPMVTFTGIECHNEWEITFEEIHRNGAIPYAIYNYTNYTGDEGYLAKEGLEVLVEVSRFWADRVHFSKRNGKYMIHGVTGPNEYENNINNNWYTNTLAAWVLDYTREALAKYPRPDLNVRADELEKWADISANMYRPHDEELGVFVQHDGFLDKDIRPVSALSPDDLPLNQKWSWDKILRSPFIKQADVLQGIYFFSDRFNIDEKRRNFDFYEPMTVHESSLSPCIHSILAAELGKEEKAVEMYQRTARLDLDNYNNDTEDGLHITSMTGSWLAIVQGFAQMKTWGGKLSFAPFLPSAWTGYAFHINYRGRLIKVAVGKENVVFTLLKGESLDLQVYGKDITLDGSHTVALEK

SEQ ID NO: 973 - protein, 221 aa, Neisseria
MTFTAVLFDLDGVITDTAEYHYRAWKKLAEELGISIDRKFNEQLKGVSRDDSLKRILAHGGKTVSEAEFAELTRRKNDNYVEMIQAVKPEDVYPGILPLLEALRANGKKIALASASKNGPFLLERMGLTHFFDAIADPAAVAHSKPAPDIFLAAAEGVDADIRQCIGIEDAAAGVAAIKAAGALPIGVGKAEDLGSDIALVSGTAELTYAYLQSVWEQSGR

SEQ ID NO: 974 - protein, 502 aa, Neisseria
MQTDCDVLIAGNGLAALTLALSLPESFRIVILCKNRLDDTASRHAQGGIAAAWSGEDDIEKHVADTLEAGAGLCDEAAVRAILSQGKPAIEWLLAQGVAFDRNHNGLHLTREGGHTCRRIAHVADYTGEAVMQSLIAQIRRRPNIRVCERQMALDIQTESGAACGLTVLDCRTQETYRIRARHTVLAGGGLGQIYAATTTPPECTGDAIAMAIRAGCAVGNLEFIQFHPTGLARPSENGRTFLISEAVRGEGGILTNQAGERFMPHYDRRAELAPRDIVARAIAAEIAKQTQDFVSLDISHQPAAFVRRHFPSIHRHCLSQCGLDITRQAIPVRPVQHYTCGGIQTDPCGRTSLPQLYALGETACTGLHGANRLASNSLLECVVTARLCAQAIADGQAFQAEPFQRPSESLSAEAGIFSDDLQNTFSRPVLQTFNQRHLGILRNDTGLRRAIAQLQLWKQNQAEPHTASEYENRNLLECSLAVAQAAYRRRQNIGAHFNSDC

SEQ ID NO: 975 - protein, 111 aa, Neisseria
MQMHWLFLTVAILSEVCGSSMLKLSGGFSKLWPSIGVVVSFSVCFWALSMTLKTMPLATAYAIWAGVGLVLTALVSVVFFGEKADFIGIVSIGLILLGVVLLNTMSHMSGH

SEQ ID NO: 976 - protein, 370 aa, Neisseria
MQTAARRSFDYDMPLIQTPTSACQIRQAWAKVADTPDRETADRLKDEIKALLKEKNAVLVAHYYVDPLIQDLALETGGCVGDSLEMARFGAEHEAGTLVVAGVRFMGESAKILCPEKTVLMPDLEAECSLDLGCPEEAFSAFCDQHPDRTVVVYANTSAAVKARADWVVTSSVALEIVSYLKSRGEKLIWGPDRHLGDYICRETGADMLLWQGSCIVHNEFKGQELAALKAEHPEAVVLVHPESPQSVIELGDVVGSTSKLLKAAVSRPEKKFIVATDLGILHEMQKQAPDKQFIAAPTAGNGGSCKSCAFCPWMAMNSLGGIKYALTSGRNEILLDRKLGEAAKLPLQRMLDFAAGLKKKDVFNGMGPA

SEQ ID NO: 977 - protein, 312 aa, Neisseria
MDAYPEAEAPPQSIVELVPVLIAVTDGGLRVLTVAQGMLLPNGPLSPLRNSLQAGVKLWVAKQTSQPMGYVEQLYTFVDTHRRNEHGMPVLYVSYLGLVREAADSILHPDAKWQDCYGYFPWEDLRTDGGQRDAVVGRLRIWANSADTEEVRQKRLKRIHLCWGVEPENWSEEYVLQRYEMLYESGLIAEAAEPQANFDFALTGQPMRHDHRRVLATALSRLRAKIKYRPVIFELMPPEFTLLQLQNSVEAISGRLLHKQNFRRQIQQQNLIEPSDTGVSGSKGRPAQLCRFRDDVLPDRLISDIGLPLGSR

SEQ ID NO: 978 - protein, 293 aa, Neisseria
MPSEKTLFPLPDTLLRPIVEQALSEDLGRRGDITSAAVIAPDKTAKLFLVSREDGVIAGMDLARLAFQTMDPSVRFQAEIRDGQAVRAGQTLAAVEGNARALLAAERTALNYLTHLSGIATATARAVAEVAEYGTDIVCSRKTIPLLRVLQKYAVRAGGGVNHRMGLDDAVLIKDNHLAYCGSIAQAVQQAKQAVGALTCVEIEVDTLAQLDEAIAAGAERILLDNMDDETLKEAANRCHTQTAHPHTIYCEASGGIGFDRLKRVAQTGVDGIALGYLTHSSRSLDIGLDFVA

SEQ ID NO: 979 - protein, 95 aa, Neisseria
MSGKEPLNPNPVIASGRKCRLKDSSDGIFRKGRDALEKTAFQAGILFARQRGGIGRAGKRTGGGSFMPSESPPLRLFAKKVGKGTYNPVQSSINI

SEQ ID NO: 980 - protein, 93 aa, Neisseria
MNTIPLHTILKLMAHPERMAILIQLLDSERNIAELAKSLSLPATAVSNHLNRLRVEGLVDFTRYHRIIEYRLVSEEAAAILHTVRDLENKRVA

SEQ ID NO: 981 - protein, 256 aa, Neisseria
MKITTWNVNSLNVRLPQVQNLLADNPPDILVLQELKLDQDKFPAAALQMMGWHCVWSGQKTYNGVAIVSRSVPQDVHFGLPALPDDPQRRVIAATVSGVRVINVYCVNGEALDSPKFKYKEQWFAALTEFVRDEMTRHGKLVLLGDFNIAPADADCYDPEKWHEKIHCSSVERQWFQNLLDLGLTDSLRQVHPEGAFYTWFDYRGAMFQRKLGLRIDHILVSPAMAAALKDVRVDLETRALERPSDHAPVTAEFDW

SEQ ID NO: 982 - protein, 190 aa, Neisseria
MPYYLYCLRLRRLVLIFVNPLYLHQFHETQVGSVKQLIAHFDRLIDELDKQIDDHTHTHFDGKAQVAEQIKGIGSITTATLMAMLPELRRLSHKRIAGLAGIAPHPRESGETKFKSRCFGGRSAVRKALYMATVAATRFEPLIRDFHQRPLSEGKPYKVAVTACMRKLLTISNARMRDYFAENDTAENGI

SEQ ID NO: 983 - protein, 1201 aa, Neisseria
MFHFAFPAQTALRQAITDAYRRNEIEAVQDMLQRAQMSDEERNAASELARRLVTQVRAGRTKAGGVDALMHEFSLSSEEGIALMCLAEALLRIPDNATRDRLIADKISDGNWKSHLNNSPSLFVNAAAWGLLITGKLTATNDKQMSSALSRLISKGGAPLIRQGVNYAMRLLGKQFVTGQTIEEALQNGKEREKMGYRFSFDMLGEAAYTQADADRYYRDYVEAIHAIGKDAAGQGVYEGNGISVKLSAIHPRYSRTQHGRVMGELLPRLKELFLLGKKYDIGINIDAEEANRLELSLDLMEALVSDPDLAGYKGIGFVVQAYQKRCPFVIDYLIDLARRNNQKLMIRLVKGAYWDSEIKWAQVDGLNGYPTYTRKVHTDISYLACARKLLSAQDAVFPQFATHNAYTLGAIYQMGKGKDFEHQCLHGMGETLYDQVVGPQNLGRRVRVYAPVGTHETLLAYLVRRLLENGANSSFVNQIVDENISIDTLIRSPFDTIAEQGIHLHNALPLPRDLYGKCRLNSQGVDLSNENVLQQLQEQMNKAAAQDFHAASIVNGKARDVGEAQPIKNPADHDDIVGTVSFADAALAQEAVGAAVAAFPEWSATPAAERAACLRRFADLLEQHTPALMMLAVREAGKTLNNAIAEVREAVDFCRYYANEAEHTLPQDAKAVGAIVAISPWNFPLAIFTGEVVSALAAGNTVIAKPAEQTSLIAGYAVSLMHEAGIPTSALQLVLGAGDVGAALTNDARIGGVIFTGSTEVARLINKALAKRGDNPVLIAETGGQNAMIVDSTALAEQVCADVLNSAFDSAGQRCSALRILCVQEDVADRMLDMIKGAMDELVVGKPIQLTTDVGPVIDAEAQQNLLNHINKMKGVAKSYHEVKTAADVDSKKSTFVRPILFELNNLNELQREVFGPVLHVVRYRADELDNVIDQINSKGYALTHGVHSRIEGTVRHIRSRIEAGNVYVNRNIVGAVVGVQPFGGHGLSGTGPKAGGSFYLQKLTRAGEWVAPTLSQIGQADEAALKRLEALVHKLPFNAEEKKAAAAALGHARIRTLRRAETVLTGPTGERNSISWHAPKRVWIHGGSTVQAFAALTELAASGIQAVVEPDSPLASYTADLEGLLLVNGKPETAGISHVAALSPLDSARKQELAAHDGALIRILPSENGLDILQVFEEISCSVNTTAAGGNASLMAVAD

SEQ ID NO: 984 - protein, 508 aa, Neisseria
MNPMYITFAIYLVAVLLIGLAAYFSTRNFDDYILGGRSLGPFVTAMSAGASDMSGWLLMGLPGAIYLSGLNEAWIAIGLLVGAYFNWLLVAGRLRVHTEYANNALTLPDYFFHRFGAGGHLMKVVSALIILFFFTIYCASGIVAGATLFQSLFEGMTYNQAMWLGAGATIAYTFLGGFLAVSWTDTLQASLMIFALILTPVMVYLGLGGAEQMSAAIQSVAAGTGKEYGSLFAGTTVIGIISTAAWGLGYFGQPHILARFMAAESAKSLVSARRIGMTWMALCLAGAVAVGYFGIAYFGANPDKVSSMSGNHERIFIALSTLLFNPWIAGIILSAILAAVMSTLSCQLLVCSSAITEDFYKGFLRKNAQQSELVWVGRLMVLAIAVISILIASDPNSKVLGLVSYAWAGFGAAFGPIVILSVLWKRITAYGALSGMVAGALTVVVWAEWVKKPAQAAGESGLLTMYEIVPGFIVCLIVAVLVSLFNKEPSRETQERFEKADADYRATR

SEQ ID NO: 985 - protein, 30 aa, Neisseria
MPSENGRRIIGKTYRASFAVAKLHLKTPAA

SEQ ID NO: 986 - protein, 106 aa, Neisseria
MFGKQLFEEVGSKISETIANSPAKDVEKNIKAMLGGAFNRMDLVTREEFDIQQQVLIKTRTKLAALEARLEKLEAAQNPERAALEAAEAAAEEAVAEIRQQTEAGE

SEQ ID NO: 987 - protein, 498 aa, Neisseria
MSLALVYSRALSGMNAPLVEVEAHLANGLPHFNIVGLPDMEVKESRDRVRAAIIQSGFEFPAKKITVNLAPADLPKESGRFDLPIAIGILAASGQVAPEKLEEYEFAGELALSGLLRPVRGALAMAWQGMQAKRAFVLPEENAGQAAVMRGITVYGARSLGEVAAHLNGIEPLAQTECQVPQMPFEHGGQPDLCDVKGQHTARLALEIAAAGGHSLLMMGPPGTGKSMLSQRLPGILPPLTEDELVEVWALRSLLPNHQQQLDSNRPFRSPHHSASAAAMVGGGSDPRPGEISLAHHGVLFLDELPEFDRKVLEVLREPLENGEIHISRAARQAVYPAKFQLVAAMNPCPCGYLGHPVKPCRCTPESVARYRSKISGPLLDRIDLTIEVPSLSAAELMQQEAGESSASVLERVIAARDKQYARQGKVNAALSVSELDTSARIQKEAQEALGGLLEKLSLSARSFHRIMRVARTLADLAGDEEVGRSHVMKAIGFRRAL

SEQ ID NO: 988 - protein, 289 aa, Neisseria; identical to SEQ ID NO: 192

SEQ ID NO: 989 - protein, 214 aa, Neisseria
MKLKHLLPLLLSAVLSAQAYALTEGEDYLVLDKPIPQEQSGKIEVLEFFGYFCVHCHHFDPLLLKLGKALPSDAYLRTEHVVWQPEMLGLARMAAAVNLSGLKYQANPAVFKAVYEQKIRLENRSVAGKWALSQKGFDGKKLMRAYDSPEAAAAALKMQKLTEQYRIDSTPTVIVGGKYRVIFNNGFDGGVHTIKELVAKVREERKRQTPAVQK

SEQ ID NO: 990 - protein, 273 aa, Neisseria
MDFLIVLKALMMGLVEGFTEFLPISSTGHLIVFGNLIGFHSNHKVFEIAIQLGAVLAVVFEYRQRFSNVLHGLGKDRKANRFVLNLAIAFIPAAVMGLLFGKQIKEYLFNPLSVAVMLVLGGFFILWVEKRQSRAEPKIADVDALRPIDALMIGVAQVFALVPGTSRSGSTIMGGMLWGIERKTATEFSFFLAVPMMVAATAYDVLKHYRFFTLHDVGLILIGFIAAFVSGLVAVKALLRFVSKKNYIPFAYYRIVFGIAIIILWLSGWISWE

SEQ ID NO: 991 - protein, 403 aa, Neisseria
MTAPVPTCNMSGNPINLHKLTLIMPLPSPEARQFSLKLQTLIAEKIGKHGNWIPFSRFMELVLYAPQYGYYTGGSHKIGNTGDFITAPTLTSLFAQTLARQLQELLSQTAGNIYEFGAGTGQLAADLLGSISDGISRYYIIEISPELAARQKNLIQARAPEASQKVVHLTALPEAFDGIIIGNEVLDAMPVEIVRKNEGGSFEHVGVCLDNDRFTYSARPLHDLQLSALASLYFPQTDYPYTSELHPQQYAFIRTLASRLEHGCMIFIDYGFDAAQYYHPQRNQGTLIGHYRHHIIHNPFDFIGLADLTAHVNFTDIAQAGTDAGLDLIGYLPQSHFLLNLGITELLAQTGKTDSAAYICEAAAVQKLIDQHEMGELFKVIAFGKNIGIDWAGFRFGDICHKL

SEQ ID NO: 992 - protein, 151 aa, Neisseria
MFGGAHELSIDSKGRLAVPAKFRDILSRLYTPAVVVTLESKHKLLMYPVAEWEKVAAQLLNLKVADNPVLRRFQNLLLHNAEILEWDSAGRVLVSAGLRKRVDFDREVVLVGRANRLELWGREQWEAEMVQALDDDPDELAFQLSQTDLQL

SEQ ID NO: 993 - protein, 328 aa, Neisseria
MSGAESYRHITVLLNEAVDALAVREDGVYVDGTFGRGGHSRLILSRLGDAGRLIVFDKDPQAIAVAEELARSDKRVGVVHGGFASFQTALDGLGIGKVDGALFDLGISSPQIDDGSRGFSFRFDAPLDMRMDTTRGMSAAEWIAVASEQDLHEVIKNYGEERFSRRIARAIVAQRAESPIDTTRKLAQIVAQNVRTRERGQDPATRTFQAVRIFINRELEEVGAVLPQVMCRLKEGGRLAVIAFHSLEDRIVKQFVKKYSQHAPLPRWAAVREADLPELPLKIVGRALKPGEAEIAANPRARSAVLRVAERTAGPIPEQSQRKTSEWQ

SEQ ID NO: 994 - protein, 89 aa, Neisseria
MAMNKLNFLLLLAVCVSAFSVVMQQNQYRLNFTALDKAKKQEIALEQDYAQMRLQQARLANHEAIRAAAEKQNLHPPVSGNTFMVEHQR

SEQ ID NO: 995 - protein, 581 aa, Neisseria
MLIKSEYKPRMLPKEEQVKKPMTSNGRISFVLMAIAVLFAGLIARGLYLQTVTYNFLKEQGDNRIVRTQTLPATRGTVSDRNGAVLALSAPTESLFAVPKEMKEMPSAAQLERLSELVDVPVDVLRNKLEQKGKSFIWIKRQLDPKVAEEVKALGLENFVFEKELKRHYPMGNLFAHVIGFTDIDGKGQEGLELSLEDSLHGEDGAEVVLRDRQGNIVDSLDSPRNKAPKNGKDIILSLDQRIQTLAYEELNKAVEYHQAKAGTVVVLDARTGEILALANTPAYDPNRPGRADSEQRRNRAVTDMIEPGSAIKPFVIAKALDAGKTDLNERLNTQPYKIGPSPVRDTHVYPSLDVRGIMQKSSNVGTSKLSARFGAEEMYDFYHELGIGVRMHSGFPGETAGLLRNWRRWRPIEQATMSFGYGLQLSLLQLARAYTALTHDGVLLPVSFEKQAVAPQGKRIFKESTAREVRNLMVSVTEPGGTGTAGAVDGFDVGAKTGTARKFVNGRYADNKHIATFIGFAPAKNPRVIVAVTIDEPTAHGYYGGVVAGPPFKKIMGGSLNILGISPTKPLTAAAVKTPS

SEQ ID NO: 996 - protein, 492 aa, Neisseria
MFSKLTPLAETGIPTLSCANAAGRLLHSDSRQIKQGDIFVACPGEYADGRSYIPAAVANGAAFVFWDDDGKFAWNPEWKVPNQGIKDLKHRAGILAAQVYGNVSDGLKVWGVAGTNGKTSITQWLAQAADLLGEKTAIVGTVGNGFWGALEETTHTTPAPVDVQTLLYRFRQQGATVAAMEVSSHGLDQSRVNGVSFRSAIFTNLTRDHLDYHGTMEAYGAIKSRLFYWHGLKHAVINVDDEYGAELVGRLKKDCPDLAVYSYGFSEHADIRITDFTASSDGIAAVFQTPWGEGKCRTRLLGRFNAQNLAACIALLCANGYPLDKVLDVLAKIRPASGRMDCIMNSGKPLVVVDYAHTPDALEKALATLQEIKPQGAALWCVFGCGGNRDRGKRPLMGAAAVQGADKVVVTSDNPRLENPHDIINDILPAVPAPECVEADRAAAVRYAVEQAAANDIILIAGKGHENYQDVQGVKHRFSDLEIVGQALLTRK

SEQ ID NO: 997 - protein, 455 aa, Neisseria
MKPLDLNFICQALKLPMPSESKPVSRIVTDSRDIRAGDVFFALAGERFDAHDFVEDVLAAGAAAVVVSREDCAAMDGALKVDDTLAALQTLAKAWRENVNPFVFGITGSGGKTTVKEMLAAVLRRRFGDDAVLATAGNFNNHIGLPLTLLKLNEKHRYAVIEMGMNHFGELAVLTQIAKPNAALVNNAMRAHVGCGFDGVGDIAKAKSEIYQGLCSDGIALIPQEDANMAVFKTATLNLNTRTFGIDSGDVHAENIVLKPLSCEFDLVCGDERAAVVLPVPGRHNVHNAAAAAALALAAGLSLNDVAEGLKGFSNIKGRLNVKSGIKGATLIDDTYNANPDSMKAAIDVLARMPAPRIFVMGDMGELGELGEDEAAAMHAEVGAYARDQGIEAAYFVGDNSVEAAEKFGADGLWFAAKDPLIQVLRHDLPERATVLVKGSRFMQMEEVVEALEDK

SEQ ID NO: 998 - protein, 58 aa, Neisseria
MKSRRFFKALLLIAALVGAFYAGMRTQAYLYEDLCLDLGGGKNPGSYPICVIEKVPAR

SEQ ID NO: 999 - protein, 360 aa, Neisseria
MFLWLAHFSNWLTGLNIFQYTTFRAVMAALTALAFSLMFGPWTIRRLTALKCGQAVRTDGPQTHLVKNGTPTMGGSLILTAITVSTLLWGNWANPYIWILLGVLLATGALGFYDDWRKVVYKDPNGVSAKFKMVWQSSVAIIASLALFYLAANSANNILIVPFFKQIALPLGVVGFLVLSYLTIVGTSNAVNLTDGLDGLATFPVVLVAAGLAIFAYASGHSQFAQYLQLPYVAGANEVVIFCTAMCGACLGFLWFNAYPAQVFMGDVGALALGAALGTVAVIVRQEFVLVIMGGLFVVEAVSVMLQVGWYKKTKKRIFLMAPIHHHYEQKGWKETQVVVRFWIITIVLVLIGLSTLKIR

SEQ ID NO: 1000 - protein, 198 aa, Neisseria; identical to SEQ ID NO: 2

SEQ ID NO: 1001 - protein, 445 aa, Neisseria
MTFQNKKILVAGLGGTGISMIAYLRKNGAEVAAYDAELKPERVSQIGKMFDGLVFYTGRLKDALDNGFDILALSPGISERQPDIEAFKQNGGRVLGDIELLADIVNRRDDKVIAITGSNGKTTVTSLVGYLCIKCGLDTVIAGNIGTPVLEAEWQREGKKADVWVLELSSFQLENTESLRPTAATVLNISEDHLDRYDDLLDYAHTKAKIFRGDGVQVLNADDAFCRAMKRAGREVKWFSLEHEADFWLERETGRLKQGNEDLIVTQDIPLQGLHNAANVMAAVALCEAIGLSREALLEHVKTFQGLPHRVEKIGEKNGVVFIDDSKGTNVGATAAAIAGLQNPLFVILGGMGKGQDFTPLRDALVGKAKGVFLIGVDAPQIRRDLDGCGLNMTDCATLGEAVQTAYAQAEAGDIVLLSPACASFDMFKGYAHRSEVFIEAFKAL

SEQ ID NO: 1002 - protein, 423 aa, Neisseria
MGDGVHTLLLDRPIVRDGRKFDAPLLWMVVLMTAFSLLMIYSASVYLASKEGGDQFFYLTRQAGFVVAGLIASGLLWFLCRMRTWRRLVPWIFALSGLLLVVVLIAGREINGATRWIPLGPLNFQPTELFKLAVILYLASLFTRREEVLRSMESLGWQSIWRGTANLIMSATNPQARRETLEMYGRFRAIILPIMLVAFGLVLIMVQPDFGSFVVITVIAVGMLFLAGLPWKYFFVLVGSVLGGMVLMITAAPYRVQRVVAFLDPWKDPQGAGYQLTHSLMAIGRGEWFGMGLGASLSKRGFLPEAHTDFIFAIIAEEFGFFGMCVLIFCYGWLVVRAFSIGKQSRDLGLTFNAYIASGIGIWIGIQSFFNIGVNIGALPTKGLTLPLMSYGGSSVFFMLISMMLLLRIDYENRRKMRGYRVE

SEQ ID NO: 1003 - protein, 355 aa, Neisseria
MGGKTFMLMAGGTGGHIFPALAVADSLRARGHHVIWLGSKDSMEERIVPQYGIRLETLAIKGVRGNGIKRKLMLPVTLYQTVREAQRIIRKHRVECVIGFGGFVTFPGGLAAKLLGVPIVIHEQNAVAGLSNRHLSRWAKRVLYAFPKAFSHEGGLVGNPVRADISNLPVPAERFQGREGRLKILVVGGSLGADVLNKTVPQALALLPDNARPQMYHQSGRGKLGSLQADYDALGVKAECVEFITDMVSAYRDADLVICRAGALTIAELTAAGLGALLVPYPHAVDDHQTANARFMVQAEAGLLLPQTQLTAEKLAEILGGLNREKCLKWAENARTLALPHSADDVAEAAIACAA

SEQ ID NO: 1004 - protein, 469 aa, Neisseria
MMKNRVTNIHFVGIGGVGMSGIAEVLHNLGFKVSGSDQARNAATEHLGSLGIQVYPGHTAEHVNGADVVVTSTAVKKENPEVVAALEQQIPVIPRALMLAELMRFRDGIAIAGTHGKTTTTSLTASILGAAGLDPTFVIGGKLNAAGTNARLGKGEYIVAEADESDASFLHLTPIMSVVTNIDEDHMDTYGHSVEKLHQAFIDFIHRMPFYGKAFLCIDSEHVRAILPKVSKPYATYGLDDTADIYATDIENVGAQMKFTVHVQMKGHEQGSFEVVLNMPGRHNVLNALAAIGVALEVGASVEAIQKGLLGFEGVGRRFQKYGDIKLPNGGTALLVDDYGHHPVEMAATLAAARGAYLEKRLVLAFQPHRYTRTRDLFEDFTKVLNTVDALVLTEVYAAGEEPIAAADSRALARAIRVLGKLEPIYCENVADLPEMLLNVLQDGDIVLNMGAGSINRVPAALLALSKQI

SEQ ID NO: 1005 - protein, 304 aa, Neisseria
MQNFGKVAVLMGGFSSEREISLDSGTAILNALKSKGIDAYAFDPKETPLSELKAQGFQTAFNILHGTYGEDGAVQGALELLGIPYTGSGVAASAIGMDKYRCKLIWQALGLPVPEFAVLHDDTDFDAVEEKLGLPMFVKPAAEGSSVGVVKVKGKGRLKSVYEELKHLQGEIIAERFIGGGEYSCPVLNGKGLPGIHIIPATEFYDYEAKYNRDDTIYQCPSEDLTEAEESLMRELAVRGAQAIGAEGCVRVDFLKDTDGKLYLLEINTLPGMTSHSLVPKSAAVTGVGFADLCIEILKTAHVG

SEQ ID NO: 1006 - protein, 235 aa, Neisseria
MERLTRWLLVMMAMLLAASGLVWFYNSNHLPVKQVSLKGNLVYSDKKTLGSLAKEYIHGNILRTDINGAQEAYRRYPWIASVMVRRRFPDTVEVVLTERKPVARWGDHALVDGEGNVFEARLDRPGMPVFRGAEGTSAEMLRRYDEFSTVLAKQGLGIKEMTYTARSAWIVVLDNGITVRLGRENEMKRLRLFTEAWQHLLRKNKNRLSYVDMRYKDGFSVRYASDGLPEKESEE

SEQ ID NO: 1007 - protein, 414 aa, Neisseria
MEQQQRYISVLDIGTSKVLALIGEVQDDDKINIVGLGQAPSRGLRAGMVTNIDATVQAIRQAVNDAELMADTKITHVTTGIAGNHIRSLNSQGVVKIKDGEVTQADIDRAIETAKAINIPPDQKILDAVVQDYIIDTQLGVREPIGMSGVRLDTRVHIITGASTAVQNVQKCIERCGLKSDQIMLQPLASGQAVLTEDEKDLGVCVIDIGGGTTDIAVYMNGAIRHTSVIPAGGNLITKDLSKSLRTPLDAAEYIKIHYGVASCDTEGLGEMIEVPGVGDRTSRQVSSKVLAAIISARIQEIFGVVLGELQKSGFPKEVLNAGIVLTGGVSMMTGIVEFAEKIFDLPVRTGAPQEMGGLSDRVRTPRFSTAIGLLHAACKLEGNLPQPENGAVQEREGGGGLLARLKRWIENSF

SEQ ID NO: 1008 - protein, 392 aa, Neisseria
MEFVYDVAESAVSPAVIKVIGLGGGGCNAINNMVANNVRGVEFISANTDAQSLAKNHAAKRIQLGTNLTRGLGAGANPDIGRAAAQEDREAIEEAIRGANMLFITTGMGGGTGTGSAPVVAEIAKSLGILTVAVVTRPFAYEGKRVHVAQAGLEQLKEHVDSLIIIPNDKLMTALGEDVTMREAFRAADNVLRDAVAGISEVVTCPSEIINLDFADVKTVMSNRGIAMMGSGYAQGIDRARMATDQAISSPLLDDVTLDGARGVLVNITTAPGCLKMSELSEVMKIVNQSAHPDLECKFGAAEDETMSEDAIRITIIATGLKEKGAVDFVPAREVEAVAPSKQEQSHNVEGMIRTNRGIRTMNLTAADFDNQSVLDDFEIPAILRRQHNSDK

SEQ ID NO: 1009 - protein, 436 aa, Neisseria
MDTSKQTLLDGIFKLKANGTTVRTELMAGLTTFLTMCYIVIVNPLILGETGMDMGAVFVATCIASAIGCFVMGFVGNYPIALAPGMGLNAYFTFAVVKGMGVPWQVALGAVFISGLIFILFSFFKVREMLVNALPMGLKMSIAAGIGLFLALISLKGAGIIVANPATLVGLGDIHQPSALLALFGFAMVVVLGHFRVQGAIIITILTITVIASLMGLNEFHGIIGEVPSIAPTFMQMDFEGLFTVSMVSVIFVFFLVDLFDSTGTLVGISHRAGLLVDGKLPRLKRALLADSTAIVAGAALGTSSTTPYVESAAGVSAGGRTGLTAVTVGVLMLACLMFSPLAKSVPAFATAPALLYVGTQMLRSARDIDWDDMTEAAPAFLTIVFMPFTYSIADGIAFGFISYAVVKLLCRRTKDVPPMVWIVAVLWALKFWYLG

SEQ ID NO: 1010 - protein, 34 aa, Neisseria
MKPIQMFSPFLNNPLVFFLSAVLPHNSERSAVFL

SEQ ID NO: 1011 - protein, 292 aa, Neisseria
MMSQHSAGARFRQAVKESNPLAVAGCVNAYFARLATQSGFKAIYLSGGGVAACSCGIPDLGITTMEDVLIDARRITDNVDTPLLVDIDVGWGGAFNIARTIRNFERAGVAAVHIEDQVAQKRCGHRPNKAIVSKDEMVDRIKAAVDARVDENFVIMARTDALAVEGLDAAIERAQACVEAGADMIFPEAMTDLNMYRQFADAVKVPVLANITEFGSTPLYTQSELAENGVSLVLYPLSSFRAASKAALNVYEAIMRDGTQAAVVDSMQTRAELYEHLNYHAFEQKLDKLFQK

SEQ ID NO: 1012 - protein, 384 aa, Neisseria
MTETTQTPTLKPKKSVALSGVAAGNTALCTVGRTGNDLSYRGYDILDLAQKCEFEEVAHLLIHGHLPNKFELAAYKTKLKSMRGLPIRVIKVLESLPAHTHPMDVMRTGVSMLGCVHPERESHPESEARDIADKLIASLGSILLYWYQYSHNGKRIEVESDEETIGGHFLQLLHGKRPSESHIKAMHVSLILYAEHEFNASTFTARVIAGTGSDMYSSITGAIGALKGPKHGGANEVAYDIQKRYRNADEAEADIRERIGRKEIVIGFGHPVYTISDPRNVVIKEVARGLSKETGDMRLFDIAERLESVMWEEKKMFPNLDWFSAVSYQKLGVPTAMFTPLFVISRTTGWSAHVLEQRKDGKIIRPSANYTGPEDLAFVEIEER

SEQ ID NO: 1013 - protein, 262 aa, Neisseria; identical to SEQ ID NO: 217

SEQ ID NO: 1014 - protein, 868 aa, Neisseria
MAANQRYRKPLPGTDLEYYDARAACEDIKPGSYDKLPYTSRILAENLVNRADKVDLPTLQSWLGQLIEGKQEIDFPWYPARVVCHDILGQTALVDLAGLRDAIAEKGGDPAKVNPVVQTQLIVDHSLAVECGGYDPDAFRKNREIEDRRNEDRFHFINWTKTAFENVDVIPAGNGIMHQINLEKMSPVVQVKNGVAFPDTCVGTDSHTPHVDSLGVISVGVGGLEAETVMLGRASMMRLPDIVGVELNGKRQAGITATDIVLALTEFLRKERVVGAFVEFFGEGARSLSIGDRATISNMTPEFGATAAMFAIDEQTIDYLKLTGRDDAQVKLVETYAKTAGLWADALKTAVYPRVLKFDLSSVTRNMAGPSNPHARFATADLAAKGLAKPYEEPSDGQMPDGSVIIAAITSCTNTSNPRNVVAAALLARNANRLGLKRKPWVKSSFAPGSKVAEIYLKEAGLLPEMEKLGFGIVAFACTTCNGMSGALDPKIQKEIIDRDLYATAVLSGNRNFDGRIHPYAKQAFLASPPLVVAYALAGSIRFDIENDVLGVADGKEIRLKDIWPADEEIDAVVAEYVKPQQFRDVYVPMFDTGTAQKAPSPLYDWRPMSTYIRRPPYWEGALAGERTLRGMRPLAILPDNITTDHLSPSNAILAVSAAGEYLAKMGLPEEDFNSYATHRGDHLTAQRATFANPKLFNEMVKNEDGSVRQGSFARVEPEGETMRMWEAIETYMNRKQPLIIIAGADYGQGSSRDWAAKGVRLAGVEAIVAEGFERIHRTNLIGMGVLPLQFKPDTNRHTLQLDGTETYDVVGERTPRCDLTLVIHRKNGETVEVPVTCCLDTAEEVLVYEAGGVLQRFAQDFLEGNAA

SEQ ID NO: 1015 - protein, 389 aa, Neisseria
MPQIKIPAVYYRGGTSKGVFFKRSDLPEAAREAGSARDKILLRVLGSPDPYGKQIDGLGNASSSTSKAVILDKSERADHDVDYLFGQVSIDKPFVDWSGNCGNLTAAVGAFSIEQGLVDKGKIPSDGICTVKIWQKNIGKTIIAHVPMQNGAVLETGDFELDGVTFPAAEVQIEFLDPADGEGSMFPTGNLVDEIDVPNIGRLKATLINAGIPTVFLNAADLGYTGKELQDDINNDAAALEKFEKIRAYGALKMGLISDVSEAAARAHTPKVAFVAPAADYTASSGKTVNAADIDLLVRALSMGKLHHAMMGTASVAIATAAAVPGTLVNLAAGGGTRKEVRFGHPSGTLRVGAAAECQDGQWTATKAVMSRSARVMMEGWVRVPEDCF

SEQ ID NO: 1016 - protein, 399 aa, Neisseria
MSDQLILVLNCGSSSLKGAVIDRKSGSVVLSCLGERLTTPEAVITFNKDGNKRQVPLSGRNCHAGAVGMLLNELEKHGLHDRIKAIGHRIAHGGEKYSESVLIDQAVMDELNACIPLAPLHNPANISGILAAQEHFPGLPNVGVMDTSFHQTMPERAYTYAVPRELRKKYAFRRYGFHGTSMRYVAPEAARILGKPLEDIRMIIAHLGNGASITAIKNGKSVDTSMGFTPIEGLVMGTRCGDIDPGVYSYLTSHAGMDVAQVDEMLNKKSGLLGISELSNDCRTLEIAADEGHEGARLALEVMTYRLAKYIASMAVGCGGVDALVFTGGIGENSRNIRAKTVSYLDFLGLHIDTKANMEKRYGNSGIISPTDSSPAVLVVPTNEELMIACDTAELAGIL

SEQ ID NO: 1017 - protein, 213 aa, Neisseria
MTIRKQTMAQFFAIHPDNPQERLIKQAVEIVNKGGVVVYPTDSCYALGCKLGDKAAMERILSIRKIDLKHHLTLMCADLSELGTYAKVDNVQFRQLKAATPGPYTFILQATKDVPARTLHPKRKTIGLRIPDNAIAQALLGELGEPLLSCTLMLPEDGEPLTDPYEIRERLEHAVDLVIDGGWCGTEPTTVVDMTDGTELVRQGCGDTAVFGL

SEQ ID NO: 1018 - protein, 147 aa, Neisseria
MYLTQHTDYGLRVLIYTAINDDALVNISTIAVTYGISKSHLMKVVTALVKGGFLHSVRGKGGGLRLAAPPDRINIGSVVRHLEPMQLVECMGENNECLITPSCRLTGILGGAMKSFFTYLDGFTLQDLLNKPTYDLLYEPRIPIAVQ

SEQ ID NO: 1019 - protein, 122 aa, Neisseria
MKPLKRHPALIGLSRDHHHSLSLCVRLLRTPEERHRDELEPHFSELETHFREEETKFAPIWQNVAPELKQRFEKDHARLRQMMASPEYGNAAWNTAFATTLRDHARFEERELFPAAEPFLPA

SEQ ID NO: 1020 - protein, 384 aa, Neisseria; identical to SEQ ID NO: 354

SEQ ID NO: 1021 - protein, 290 aa, Neisseria
MPILNHIALIGVGLIGGSFVLDLKRQGLVRTVTGIDTDRDNLERALERGVIDQASVAIDADSIGGADLVLIATPVATVPAILTALRPVLPEHTWISDVGSTKSSVIEAFRRCLPDRLHHCIAAHPIAGSDRSGAQAAQFGLFRHRKLIITPHGGEHSDGIALVENLWHAVGAEIYTMDAQRHDAVFAAVSHMPHLTAFAYVHQILDHPDGQEYLKFAATGFRDFTRIASGHPAVWADICLANKDSLLQLVQGLGKQLDVLANILTTDDREALYRYFEEAKTTRDRWLDGN

SEQ ID NO: 1022 - protein, 270 aa, Neisseria
MDKIRVAAVQMVSGVSPETNVAAMKRLVARAAEQGADWVLLPEYWVLMGANDTDKLALAEPLGGGRFQTALSETAKECGVVLFGGTVPLQSCEAGKVMNTLLVYGRDGVRTGLYHKMHLFGFSGLGERYAEADTIRAGGDVPHLSAEGVPVAAGICYDVRFPEFFRRQLPFDVLMLPAAFTHTTGKAHWELLLRARAVENQCYVVAAAQGGLHENGRRTFGHSMIVDPWGDVLDVLPEGEGVVTADIDANRLNSVRNRLPALKYRVLDAV

SEQ ID NO: 1023 - protein, 321 aa, Neisseria
MSYTQLTQGERYHIQYLSRHCTVTEIAKQLNRHKSTISREIRRHRTQGQQYSAEKAQRQSQTIKQRKRQPYKLDSQLIQHIDPLIRRKLSPEQVCAYLRKHHQITLHHSTIYRYLRQDKSNGSTLWQHLRICSKPYRKRYGSTWTRGKVPNRVGIENRPAIVDQKSRIGDWEADTIVGKGQKSALLTLVERVTRYTIICKLDSLKAEDTARAAVRALKAHKDRVHTITMDNGKEFYQHTKITKALKAETYFCRPYHSWEKGLNENTNGLIRQYFPKQTDFRNISDREIRRVQDELNHRPRKTLGYETPSVLFLNLFQPLIH

SEQ ID NO: 1024 - protein, 284 aa, Neisseria; identical to SEQ ID NO: 122

SEQ ID NO: 1025 - protein, 410 aa, Neisseria
MPSAHYPEMSEKLMAVLMAMLVTLMPFSIDAYLPAIPEMAQSLNADVHRIEQSLSLFMFGTAFGQVVGGSVSDIKGRKPVALTGLIVYCLAVAAIVFVSSAEQLLNLRVVQAFGAGMTVVIVGAMVRDYYSGRKAAQMFALIGIILMVVPLVAPMVGALLQGLGGWQAIFVFLAAYSLVLLGLVQYFLPKPAVGGKIGRDVFGLVAGRFKRVLKTRAAMGYLFFQAFSFGSMFAFLTESSFVYQQLYRVTPHQYAWAFALNIITMMFFNRVTAWRLKTGVHPQSILLWGIVVQFAANLSQLAAVLFFGLPPFWLLVACVMFSVGTQGLVGANTQACFMSYFKEEGGSANAVLGVFQSLIGAGVGMAATFLHDGSATVMAATMTASTSCGIALLWLCSHRAWKENGQSEYL

SEQ ID NO: 1026 - protein, 362 aa, Neisseria
MSQTIDELLLPHRNAIDTIDAEILRLLNERAQHAHAIGELKGTGAVYRPEREVAVLRRIQDLNKGPLPDESVARLFREVMSECLAVERPLTIAYLGPQGTFTQQAAIKHFGHAAHTMACPTIDDCFKQVETRQADYLVAPVENSTEGSVGRTLDLLAVTALQACGEIVLRIHHNLLRKNNGSTEGIAKVFSHAQALAQCNDWLGRHLPNAERIAVSSNAEAARLVAESDDGTVAAIAGRTAAEIYGLDMVAECIEDEPNNTTRFLVMGHHETGASGSDKTSLAVSAPNRAGAVASLLQPLTESGISMTKFESRPSKSVLWEYLFFIDIEGHRRDAQIQTALERLGERASFVKVIGSYPTAVL

SEQ ID NO: 1027 - protein, 263 aa, Neisseria
MSEYRVNHEPVFMLASSPWRESSLWVEAFSRRYGRVALLARSARKRQSELRGVLVPFVPVSVSWYGSQELKTLHRAEWVGGWRQPQGRALFGGLYVNELVLKLTAREDPVPELYDALAEVMEAVCCKAAYIDDLRRFEWRLLNLLGVAPDLNRDGDGGTIAAGGTYLVRPETAVFPVGKGFAVPPHAAGVVAPGQSLIDLREGSFRTAESLQQALKITRLFIRHLLPEGLKSRQVLEQIRQFDRKETARETVPTSDGTASNAV

SEQ ID NO: 1028 - protein, 242 aa, Neisseria
MLLGVNIDHIATVRNARGTTYPSPVEAALVAETHGADLITMHLREDRRHIKDADVFAVKNAIRTRLNLEMALTEEMLENALKVMPEDVCIVPEKRQEITTEGGLDVLAQQEKIAGFTKILTDAGIRVSLFIDADDRQIQAARDVGAPVVELHTGAYADARSHAEQIRQFERIQNGAHFAGDLGLVVNAGHGLTIHNVTPIAQILAIRELNIGHSLIAQALFLGLPEAVRQMKEAMFRARLLP

SEQ ID NO: 1029 - protein, 74 aa, Neisseria
MNQKYILSANNNSLIEEIHNTVQSIGYCIVRGLNLNHLDGSRRNKKLFDFLSQLGMLTNHKGDGFKSIFWDIKY

SEQ ID NO: 1030 - protein, 148 aa, Neisseria
MYVVKSANDGGNSLFLSSSDIVNQLSKTETGKKHLKTLTGNLYPFKTPASFDKKQGVRWGNILSVNTQMIRFRSDCIYKGIEENRNKVSKEMVLALDYLINVIKNASDIQEFSAQDDGLIIIDNVNGLHARTDYTDKNRHYIRARITV

SEQ ID NO: 1031 - protein, 255 aa, Neisseria; identical to SEQ ID NO: 484

SEQ ID NO: 1032 - protein, 125 aa, Neisseria
MIYGIGTDIVSLKRIIRLNKKFGQAFAGRILTPEELLEFPQAGKPVNYLAKRFAAKEAFAKAVGTGIRGAVSFRNIGIGHDALGKPEFFYGPALSKWLEEQGISRVSLSMSDEEDTVLAFVVAEK

SEQ ID NO: 1033 - protein, 269 aa, Neisseria
MIQDTRPLIRVVAGILLDSDGNYLLSSRPEGKPYAGYWEFAGGKVEAGETDFQALQREFEEELGIRILAATPWLTKIHSYEHARVCLKFLWVNPDQWTGKPQSREGQEWSWQKAGDFTVAPMLPANGALLRSLSVPRRLYGSLKTGLHGENSMGAYRVLPLGSAEGSGANVLMEAAQWQDRPEHADSVWMVVQTREQWRRAQEKGADAVVWRVCDDVQAQEAAEALRQGVSVPLVLAANGQTVARYGKLWLGLGAHVVVRDETIGKNHE

SEQ ID NO: 1034 - protein, 140 aa, Neisseria
MNKNRKLLLAALLLIAFAAVKLVLLQWWQAQQPQAVAAQCDLTEGCTLPDGSRVRAAAVSTKKPFDIYIEHAPAGTEQVSISFSMKNMDMGFNRYMFERQPSGTWQAVRIRLPICVEGRRDFTADITIGSRTFQTAFTAE

SEQ ID NO: 1035 - protein, 380 aa, Neisseria
MNTLYTLFATCPRGLETVLSQELESLGCTDVQVFDGGVSCRGGLEQVYAANLHSRTASRILLRLTKGTYRNERDIYKLAKNINWFNWFTLQQTFKVKVEAKRANVKSIQFVGLTVKDAVCDAFRDIYDARPSVDKAAPDVRIHAFLNERNVEIFIDTSGEALFKRGYRLDTGEAPLRENLAAGLLLSAGYDGTQPFQDPFCGSGTIAIEAAWIAARRAPGMMRRFGFEKLQNFDKTLWSDLRRRAEAQTRPVRAPIAGSDNDRRIVQTALDNARRAGVDDIVSFSVADAQSVRPNGENGIMVSNPPYGVRLEEVRALQALYPQLGTWLKKHYAGWLAAMFTGDREMPKFMCLSPKRKIPLYNGNIDCRLFLIDMVEGSNR

SEQ ID NO: 1036 - protein, 416 aa, Neisseria
MIKLTRRQIIRRTAGTLFALSPIASAVAKTVRAPQFTAARIWPSHTYTRLTLESTAALKYQHFTLDNPGRLVVDIQNANINTVLHGLSQKVMADDPFIRSIRAGQNTPTTVRLVIDLKQPTHAQVFALPPVGGFKNRLVVDLYPHGMDADDPMMALLNGSLNKTLRGSPEADLAQNTTPQPGRGRNGRRPVIMLDPGHGGEDPGAISPGGLQEKHVVLSIARETKNQLEALGYNVFMTRNEDVFIPLGVRVAKGRARRADVFVSIHADAFTSPSARGTGVYMLNTKGATSSAAKFLEQTQNNADAVGGVPTSGNRNVDTALLDMTQTATLRDSRKLGKLVLEELGRLNHLHKGRVDEANFAVLRAPDMPSILVETAFLSNPAEEKLLGSESFRRQCAQSIASGVQRYINTSVLKRG

SEQ ID NO: 1037 - protein, 153 aa, Neisseria
MSDLPSISRFLADEAATLDLGAAWSSRLNAPLVIYLEGDLGAGKTTLTRGILRGLGHQGAVKSPTYAIVESYPLERFTLHHFDLYRFSFPEEWEDAGLDELFAANSVCLIEWPQQGGEFTPPADITATLTHDGDGRKCLLTAHTERGRESLPL

SEQ ID NO: 1038 - protein, 270 aa, Neisseria
MENIGRQRPIGVFDSGIGGLTNVRALMERLPMENIIYFGDTARVPYGTKSKATIENFSMQIVDFLLEHDVKAMVIACNTIAAVAGQKIRQKTGNMPVLDVISAGAKAALATTRNNKIGIIATNTTVNSNAYARAIHRNNPDTLVRTQAAPLLVPLVEEGWLEHEVTRLTVCEYLKPLLADGIDTLVLGCTHFPLLKPLIGREAGNVALVDSAITTAEETARVLAQEGLLNTDNNNPDYRFYVSDIPLKFRTIGERFLGRTMEQIEMVSLG

SEQ ID NO: 1039 - protein, 369 aa, Neisseria
MSNWKPNIPYNDLPPLPPKQDIESKTILKRCIAARASLARLKQAAELIPNQAMLINTLPVMEARASSEIENIVTTTDKLFQSLQMDTERQDPATKEALQYRTALFAGYESLTSRPLCTQTAIMVCNAIKHPYEMAIRKTGGTALKGGNSGNVVYTPPEGEETIRGKLANWERFIHESGDLDPLIIMAAAHYQFEAIHPFTDGNGRTGRILNSLLLIEKGLLDLPILYLSRYIIENRADYYRLLLGVTERQDWESWIIYILDGVADTADWTVSKIDAIRRLFEQTRQHIRTHAQGIYTHELVNLLFEQPYTRIANLEAAGIAKRQTASKYLKELSDIGVLQEIVIGRDKLFIHPRLMELLRGEGNSFTSF

SEQ ID NO: 1040 - protein, 712 aa, Neisseria; identical to SEQ ID NO: 539

SEQ ID NO: 1041 - protein, 915 aa, Neisseria
MQQQHLFRFNILCLSLMTALPAYAENVQAGQAQEKQLDTIQVKAKKQKTRRDNEVTGLGKLVKSSDTLSKEQVLNIRDLTRYDPGIAVVEQGRGASSGYSIRGMDKNRVSLTVDGVSQIQSYTAQAALGGTRTAGSSGAINEIEYENVKAVEISKGSNSVEQGSGALAGSVAFQTKTADDVIGEGRQWGIQSKTAYSGKNRGLTQSIALAGRIGGAEALLIHTGRRAGEIRAHEDAGRGVQSFNRLVPVEDSSNYAYFIVKEECKNGSYETCKANPKKDVVGKDERQTVSTRDYTGPNRFLADPLSYESRSWLFRPGFRFENKRHYIGGILEHTQQTFDTRDMTVPAFLTKAVFDANKKQAGSLPGNGKYAGNHKYGGLFTNGENGALVGAEYGTGVFYDETHTKSRYGLEYVYTNADKDTWADYARLSYDRQGIGLDNHFQQTHCSADGSDKYCRPSADKPFSYYKSDRVIYGESHRLLQAAFKKSFDTAKIRHNLSVNLGFDRFGSNLRHQDYYYQHANRAYSSNTPPQNNGKKISPNGSETSPYWVTIGRGNVVTGQICRLGNNTYTDCTPRSINGKSYYAAVRDNVRLGRWADVGAGLRYDYRSTHSDDGSVSTGTHRTLSWNAGIVLKPTDWLDLTYRTSTGFRLPSFAEMYGWRAGVQSKAVKIDPEKSFNKEAGIVFKGDFGNLEASWFNNAYRDLIVRGYEAQIKDGKEEAKGDPAYLNAQSARITGINILGKIDWNGVWDKLPEGWYSTFAYNRVRVRDIKKRADRTDIQSHLFDAIQPSRYVVGLGYDQPEGKWGVNGMLTYSKAKEITELLGSRALLNGNSRNTKATARRTRPWYIVDVSGYYTVKKHFTLRAGVYNLLNYRYVTWENVRQTAGGAVNQHKNVGVYNRYAAPGRNYTFSLEMKF

SEQ ID NO: 1042 - protein, 459 aa, Neisseria
MQAFSLYPPVGHPDSAKKRQNRADVFLPFWKQDNFLGKSVQYRFEFAQIYFTMPKPCAGVTMGRGDFFFSNLFHQESARMKKSVLAVLAALSLAACGGSEKNAVQPQADAASAANAEAAATDTLNIYNWSNYVDESTVEDFKKANNLKLTYDLYENNETLEAKMLTGKSGYDLVVPGIAFLPRQIEAGAYQKVNKDLIPNYKNIDPELLKMLETADPGNQYAVPYFSGVNTIAITAKGKELLGGKLPENGWDLLFKPEYTHKLKSCGIALWDTPSEMFPILLNYLGKDPKGSNPEDLKAAAEVLKSIRPDVKRFSPSIIDELARGDICLAAGNGGDLNLAKARSEEVKNNVGIEVLTPKGMGFWIESWLIPADAKNVANAHKYINYTLDPEIAAKNGIAVTFAPASKPAREKMPAELVNTRSIFPNEQDMKDGFVMPQMSTDAKKLSVSLWQKIKVGTN

SEQ ID NO: 1043 - protein, 87 aa, Neisseria
MANSAQARKRARQSVKQRAHNASLRTAFRTAVKKVLKAVEAGDKAAAQAVYQESVKVIDRIADKGVFHKNKAARHKSRLSAKVKALA

SEQ ID NO: 1044 - protein, 382 aa, Neisseria
MPTMGAEMNTRNMRYILLTGLLPMASAFGETALQCAALTDNVTRLACYDRIFAAQLPSSAGQEGQESKAVLNLTETVRSSLDKGEAVIVVEKGGDALPADSAGETADIYTPLSLMYDLDKNDLRGLLGVREHNPMYLMPLWYNNSPNYAPGSPTRGTTVQEKFGQQKRAETKLQVSFKSKIAEDLFKTRADLWFGYTQRSDWQIYNQGRKSAPFRNTDYKPEIFLTQPVKADLPFGGRLRMLGAGFVHQSNGQSRPESRSWNRIYAMAGMEWGKLTVIPRVWVRAFDQSGDKNDNPDIADYMGYGDVKLQYRLNDRQNVYSVLRYNPKTGYGAIEAAYTFPIKGKLKGVVRGFHGYGESLIDYNHKQNGIGIGLMFNDLDGI

SEQ ID NO: 1045 - protein, 233 aa, Neisseria
MTEPAAEGGKAAKALKKYLITGILVWLPIAVTVWVVSYIVSASDQLVNLLPKQWRPQYVLGFNIPGLGVIVAIAVLFVTGLFAANVLGRQILAAWDSLLGRIPVVKSIYSSVKKVSESLLSDSSRSFKTPVLVPFPQPGIWTIAFVSGQVSNAVKAALPKDGDYLSVYVPTTPNPTGGYYIMVKKSDVRELDMSVDEALKYVISLGMVIPDDLPVKTLAGPMPSEKADLPEQQ

SEQ ID NO: 1046 - protein, 602 aa, Neisseria
MRTNYCGLISEQYLDQTVTVKGWVHRRRDHGGVIFIDLRDREGIVQVVIDPDTPEAFAAADSSRNEYVLSITGRVRNRPEGTTNDKMISGKIEILAKEIEVLNAAATPPFQIDDENISENVRLTNRVIDLRRPVMQRNLRLRYQVAMGVRRYLDAQGFIDIETPMLTRSTPEGARDYLVPSRVHPGEFFALPQSPQLFKQLLMVAGFDRYYQITKCFRDEDLRADRQPEFTQIDLETSFLNEDEIMDITEGMAKQVFKDALNVDLGDFPRMPYSEAMFYYGSDKPDMRINLKFTELTDLMKTEEFKVFRGAADMKGGRVVALRVPNGAEFSRKEIDEYTKFVGIYGAKGLAYIKVNDVSNLSNGEDSGLQSPIVKYLSENALKEIIARTGAQNGDIIFFGADKAKVVNEAIGALRIKVGLEHGKDNGYFTDEWKPLWVVDFPMFEYDEEADRYVAVHHPFTAPKEGHEDLMVSDPANCLARAYDMVLNGWEIGGGSIRIHRADVQEKVFAALKISPEEQQEKFGFLLDNLKFGAPPHGGLAFGLDRLVTLMTGAESIRDVIAFPKTQRAQCLLTNAPNSVDDKQLRELSLRLRQKATETKEV

SEQ ID NO: 1047 - protein, 94 aa, Neisseria
MKKLLLAAVVSLSAAAAFAGDSAERQIYGDPHFEQNRTKAVKMLEQRGYQVYDVDADDHWGKPVLEVEAYKDGREYDIVLSYPDLKIIKEQLDR

SEQ ID NO: 1048 - protein, 630 aa, Neisseria
MPILTIREVCNINHWGIGYYDVDDSGEIIVRPNPSQHNQTVSLQKLTEAVQQKHQARLPVLFCFPQILEHRLRDINRAFQTAREECGYKGGYCLVYPIKVNQHRRVIESLMSSGQPHGLEAGSKAELMAVLAHAGNRQTLIVCNGYKDREYIRFALMGEKLGHQVYLVIEKLSEIQMVLEEAEKLGIKPRLGVRARLASQGSGKWQSSGGEKSKFGLSASQVLQLVDILKQKNRLDCLQLLHFHLGSQLGNIRDVATGVHESARFYVELHKLGVNIRCFDVGGGLGVDYEGNRTQSDCSVNYSLNEYAATVVWGISQACLEHGLPHPTIITESGRGITAHHAVLVANVIGVERYKPRRLDAPSPEAPRVLHSMWETWTDISASREKRSLRSWIHEGQFDLADVHNQYNVGLLSLAQRAWAEQLYLNICHEVGELFNEKHRSHRTIIDELQERFADKLYVNFSLFQSLPDAWGIDQLFPVCPITGLNEPIARRAVLLDITCDSDGTIDHYIDGDGIAGTMPMPDYPEEEPPLLGFFMVGAYQEILGNMHNLFGDTATADVVVGEDGQFTVIDYDEGNTVADMLEYVYQDPKELMKRYREQIEHSDLPASQAMSFLKELEAGLNGYTYLEDE

SEQ ID NO: 1049 - protein, 307 aa, Neisseria
MQYSTLAGQTDNSLVSNNFGFLRLPLNFMPYESHADWVITGVPYDMAVSGRSGARFGPEAIRRASVNLAWEHRRFPWTFDVRERLNIIDCGDLVFSFGDSRDFVEKMEAHAGKLLSSGKRCLSLGGDHFITLPLLRAHARYFGKLALIHFDAHTDTYDNGSEYDHGTMFYTAPKEGLIDPSRSVQIGIRTEHSKKLPFTVLSAPKVNEDSVEETVRKIKETVGNMPVYLTFDIDCLDPSFAPGTGTPVCGGLSSDRALKILRGLTDLDIVGMDVVEVAPSYDQSDITALAGATIALEMLYLQGAKKD

SEQ ID NO: 1050 - protein, 488 aa, Neisseria
MMKLGFKPIPLAIAAVLCALVLALPVPDGVKPQAWTLLAMFVGVIAAIIGKAMPLGALSIIAVGLVAVTGVTADKPGAAMSDALSAFANPLIWLIAIAVMISRGLLKTGLGMRIGYLFIAVFGRKTLGIGYSLALSELLLAPVTPSNTARGGGIIHPIMQSIAGSYGSNPAKGTEGKMGKYLALVNYHSNPISSAMFITATAPNPLIVNLIAENLGSSFRLSWGAWAWAMAVPGVIAFFVMPLILYFLYPPEIKETPNAVQFAKDRLREMGKMSADEIIMAVIFGILLLLWADVPALITGNHAFSINATATAFIGLSLLLLSGVLTWDDVLKEKSAWDTIIWFGALIMMAAFLNKLGLIKWFSGVLAESVGGLGVSGTAAGVILVLAYMYAHYMFASTTAHITAMFGAFFAAAVSLNAPAMPTALMMAAASNIMMTLTHYATGTSPVIFGSGYTTMGEWWKAGFIMSVVNFLIFFVIGSIWWKVLGYW

SEQ ID NO: 1051 - protein, 358 aa, Neisseria
MICRKPIGHTPYFDMNKTICRTAALLISGFSYANTIIPDVSPVAQGQHVFINIPQQRLFLYTDGKLTKVYPVAVGRAMTQTNLGEHKIGAKAYNPVWYIPKSIQKERGDGVKTIAAGPDNPLGPVFVRLGDPKLGLGIHGTNAPASVPGVRSHGCVRMKSPDALEFAKTIASGSPASVIYQMAGLNEDADRNLWLAAFRDPYGKNNLDIASLKKSIAQWAKTQGKTIAPEKVDAVLKDRTGSAVCLTCGKNGKMKMPLKSLAWIQGSSSYSQAEVIEQTEETNSAEISETRTPEVPDVHTPEAQPHLNTQSDGTPTAYTEPAADSSPQVETPDQAASEPVDVLFSIDVIRQGNLRLGN

SEQ ID NO: 1052 - protein, 380 aa, Neisseria
MKVFKQQLEQLGAQNQYRSIPDLIHQGRYITRENRKMLNMSSNDYLGLASDENLRRSFLQQYGGNFPSFTSSSSRLLTGNFPIYTDLEELVAQRFQRESALLFNSGYHANLGILPALTTTKSLILADKFVHASMIDGIRLSRCAFFRYRHNDYEHLKNLLEKNVGKFDRTFIVTESVFSMDGDVADLKQLVQLKKQFPNTYLYVDEAHAIGVYGQNGLGIAERDNLIAEIDLLVGTFGKALASVGAYAVCNQVLKECLINQMRPLIFSTALPPFNVAWTYFIFERLPQFSKERSHLEQLSAFLRREVAHRTQIMPSQTCIVPYILGGNEATLAKAEYLQRQGYYCLPIRPSTVPKNTSRIRLSLTADMTTDEVRQFAACL

SEQ ID NO: 1053 - protein, 215 aa, Neisseria
METKFYNHQGGHLILYFAGWGTPPDAVNHLILPENHDLLICYDYQDLNLDFDFSAYRHIRLVAWSMGVWAAERALQGIRLKSATAVNGTGLPCDDNFGIPCTVFKGTLENLTENTRLKFERRMCGDKASFEDYQQFPARPFGEIHQELIALFAMIGQDRRTDLIRWTNALVGSGDKIFMPANQHRYWTPRCTVREIDVGHYLFSRFTHWSALWNH

SEQ ID NO: 1054 - protein, 260 aa, Neisseria
MESLTAINKSRIRQAFQKALNDYDRHALIQQKMTINLMTHLQDYLPDMPLENVLELGCGSGMLSALLQKQISANYWLFNDLCNVQPQLAEKLPQSFDFYCGDAENFPFQRQFDLIASASAVQWFHQPDAFITHCKTGLKTNGLLAVATFGKDNLKEVRQITNIGLNYPTLSQWQAWLAKDFELLWCEDFTVILDFDTPSDVLKHLKYTGVTATNQKNWTRKNLNGFIGDYLSAFGMPSGKVRLTYHPLFFIARYSAAGRQ

SEQ ID NO: 1055 - protein, 463 aa, Neisseria
MLLVMRAKQGKKTPKRKSQGVGNTQGQTPGSNDSDWVDQIGQSVSDGTQPDWSWNESAETASAAVSAQEVDPLTEYQVYKQFGYQGKAAESLAAYLDGIPDGEAKPENLIRELLDINLEVGDVDVLADNLQKYGKLILSELLAKYIEQALQRDSNHLRIRVLAEEGLGWGTQEIEKRAEGGSATAASASPPPDAGGKAYEAEEIKRIPIVRGKKDVSGISQEEIGAIAGLVRADQGAKILKDKVSYETASKQYDRAIQTSEKPANLIIDALKLDYQHADIDRFAGHLWKLYQTLGNYGRQVKERMLGWGYSLGYHEVFDDLEKGPNDRQIKDIGMGHGYLPKNIQKFKSQHRDLVLQDSSLINTGSSPADDAVKEVESLLMYGQIEAAMDVLEQAVLKYPDESQLYITLIDIYERTEDWDRLGQFLRVLRERADRLPEEVVMLMSRLLQRMNQNIKKIKRYGK

SEQ ID NO: 1056 - protein, 365 aa, Neisseria
MEVQLPKIKTVRVMLAGMTAQQESVFKMAFKMHNTTRYETVSPSDGSAVPDLVLADTDAEGGFELWKELAERYKDIPVAVCSEKVPDSEVPYLPKPIRFETLFPMLRKLLQGENVYGKSFIAPADRSAKNNGNVQRTVTIRQFNPNKGLLGALRFAEKNRQDIAILHGNKPVLIVFPSIQRVLLTESVQKLEELCKDENLQVSCKTVPDNPQWREKAKVGIMSCMWQFSIWTAQGRLIYPISPDTPFTLKSWPNLTRLANVPGSIRLSAFLTKASVNLNVLYKVMPLNLNDILNYLAATYTTGFLSVDLKTVSQQAYSDMADKINIGADSASDSEMMKKAEKITTPSQSQSRGLLQRLMKKLLGS

SEQ ID NO: 1057 - protein, 178 aa, Neisseria
MRENKIIFTGPVGVGKTTAIAAISDEALVQTDASASDMTLDRKRNTTVAMDYGAISLDEDTKVHLYGTPGQERFNFMWEILSQGSMGLVLLLDNARTNPLKDLEFFLHSFRGLLEKAPVVVGITKMDIRSQPGIDVYHKYLAKHNLNVPVFEIDARKEDDVKQLVSAMLFSIDPGLEV

SEQ ID NO: 1058 - protein, 214 aa, Neisseria; identical to SEQ ID NO: 306

SEQ ID NO: 1059 - protein, 119 aa, Neisseria
MQQLLISILEDLNNTSTDIIASAVISTDGLPMATMLPSHLNSDRVGAISATLLALGSRSVQELACGELEQVMIKGKSGYILLSQAGKDAVLVLVAKETGRLGLILLDAKRAARHIAEAI

SEQ ID NO: 1060 - protein, 131 aa, Neisseria
MMYSFEANANAVKISETVSVDTGQGAKIHKFVPKNSKTYSSDLIKTVDLTHIPTGAKARINAKITASVSRAGVLAGVGKLARLGAKFSTRAVPYVGTALLAHDVYETFKEDIQARGYQYDPETDKFAKVSG

SEQ ID NO: 1061 - protein, 110 aa, Neisseria
MKGRTMNKPFITQAQLALYKYQPSSKYFGQSMAVIAQSEFVEFAKINKSENVIDCFSFFWNRRIKHDIWLISFSDNSEMVIKESLKDGHKIYKFEFCEIVDNCNFDDVFV

SEQ ID NO: 1062 - protein, 92 aa, Neisseria
MYYQVGNKCLEKHQAENLYFSLVVPRIKENGQIVRPEYNGSLWKMSDGQPLRLLLAECSPKDNLQSGLETGWIVFGILASVYFVSLLKKVLK

SEQ ID NO: 1063 - protein, 94 aa, Neisseria
MFGGRLKNAPSITAKHFLKENIMKFINTCRKYGAKLAVVTAAPLALAAHANATLPDTAKNALEAAKADGMEAGWIVVGIFAALFVFSIVKRVMK

SEQ ID NO: 1064 - protein, 65 aa, Neisseria
MQKVYVVQSVSTGDFLYLSPETGDIGHTKLITNADYFYDFEEAINAGLEEIGNQYEFVVFGFLKD

SEQ ID NO: 1065 - protein, 96 aa, Neisseria
MNIQLQGHIVGVKKINGQIEGKSFDYCCLIVATPLDSSQGNALGSSTTEYDFGGSANFEQFRNAQFPIEANLNVEIVTTGKTQKLKVIGFQLVKKG

SEQ ID NO: 1066 - protein, 31 aa, Neisseria
MRFSRSKPRGRLKTEKPFQTALYIASLRRDD

SEQ ID NO: 1067 - protein, 164 aa, Neisseria
MTFNQEQDYWAGYKANERALIIQTWSGFGRYAPDHLYPPHILPLDTDNETLGTTVLQALANSRTFVYDSPEDQDFFDTEKIRQRYEDWVAKLCGNLGYKTRRALFKNMMSVDIWLHNGCLKISPSRHVKLEAWDAIDADDVILSLDNSPEEIGAGLKLALSRCR

SEQ ID NO: 1068 - protein, 293 aa, Neisseria
MRTDAFKYGTWNSLNDIRSSYDRAATKIKGAGNMGLGATTFVGSGAIGGGLCSTGIGCAAGGLIATAGMTGGYTQASEGSRQLFGTYQSDFGKKVVLSLGTPIEYESPLVSDAKNLAVWGLETLITRKLGNLATGVKTSLTPKTADVQRNILSQSEVGIKWGKGIEGQGMPWEDYVGKGLSANARLPKNFKTFDYFDRGTGTAISAKTLDTQTTARLSKPEQLYSTMKGYIDKTANFKSYELSEVPLRADMIKQREIHLAIPAQTNKEQRLQLQRVVEYGKSQNITVKITEIE

SEQ ID NO: 1069 - protein, 300 aa, Neisseria
MTVGYGFSASGDYSQSKIRADHASVTEQSGIYAGEDGYQIKVRDNTDLKGGIITSSQSAEDKGKNLFQTATLTHSDIQNHSRYEGKSFGIGGSFDLNGGWDGTVTDKQGRPTDRISLAAGYGSDSDSQSSITKSGINTRNIHITDEAGQLARTGRTAKETEARIYTGIDTETADQHSGRLKNSFDKDAVAKEINLQREVTKEFGRNATQAVAAVADKLGNTQSYERYQEARTLLEAELQNTDSEAEKAAFRASLGQVNAYLAENQSRYDTWKEGGIGRSILHGAGRQSAMRRAGMSVRRQ

SEQ ID NO: 1070 - protein, 147 aa, Neisseria
MAIFYFSSKKIERNIISSNLNRKQVRAIFSSDVQEIYKSSYSRVPMDVFPELNIHCFYDDKNQLEAIEIFEPNKFFLEDISFNWLGKINDEIISYLYKSGINDFEIDDLGIRLLNIPVSTIINSIGKVECCYLDFSNRDTKFYVKQV

SEQ ID NO: 1071 - protein, 107 aa, Neisseria
MSILEENVIDSASIENGILILTISDHLKWDNEHLFLLQEKINSYIQYIESGQIFEDFGESSYETIEIQLIYKYKPNENYRKFLYRLEGALLKLKLRFSHGTISYFYS

SEQ ID NO: 1072 - protein, 2703 aa, Neisseria
MNRTLYKVVFNKHRNCMIAVAENAKREGKNTADTQAVGILPNDIAGFAGFIHSISVISFSLSLLLGSALILTSSSATAQGIVADKSAPAQQQPTILQTGNGIPQVNIQTPTSAGVSVNQYAQFDVGNRGAILNNSRSNTQTQLGGWIQGNPWLARGEARVVVNQINSSHSSQLNGYIEVGGRRAEVVIANPAGIAVNGGGFINASRATLTTAQPQYQAGDLSGFKIRQGNVVIAGHGLDARDTDYTRILSYHSKIDAPVWGQDVRVVAGQNDVAATGDAHSPILNNAAANTSNNTANNGTHIPLFAIDTGKLGGMYANKITLISTVEQAGIRNQGQWFASAGNVAVNAEGKLVNTGMIAATGENHAVSLHARNVHNSGTVASQDDANIHSQTLDNSGTVLSSGRLTVRNLGRLKNQNNGTIQAARLDMSTGGLDNTGNITQTGSQALDLVSAGKFDNSGKIGVSDVPQTGLNPNPSVIPQIPSTATGSGSSTVSVSKPGSNNPVSPTAPAKNYAVGRIQTTGAFDNAGSINAGGQIDIAAQNGLGNSGSLNAAKLRVSGDSFNNTVKGKLQAHDLAVNTQTAKNSGHLLTQTGKIDNRELHNAGEIAANNLTLIHSGRLSNDKKGNIRAAHLQLDTAGLHNAGNILADSGTVTTKNNLRNTGKVSVARLNTEGQTLDNTRGRIEAETVNIQSQQLTNQSGHITATEQLTINSRNVDNQNGKLLSANQAQLAVSDGLYNQHGEIATNRQLSIHDKNQNTLALNNADGTIQSAGNVSLQAKSLANNGTLTAGNKLDIALTDDFVVERDLTAGKQLNLSIKGRLKNTHTLQAGHTLKLNAGNIDNQVTGKIIGGEQTDITSEQHVDNRGLINSDGLTHIGAGQTLTNTGTGKIYGNHIALDAQILLNREETTEGSTKAGAIAARKRLDIGAKEIHNQEGALLSSEGIFAVGNRLDEQHHAAGMADTFVNGSAGLEVQGDALMSVRNMQNINNHFKTETYLAKAEKQVRDYTVLGQNTYYQAGKDGLFDNSQGQKDQTTATFHLKNGSRIEANQWHVRDYHIETYKERIIENRPAHITVGGDLTASGQNWLNKDSRIVVGGRIITDDLNQKEITNQSTTGKGRTDAVGTQWDSVTKKGWYSGRKRQRRTERNHTPYHDTQLFTHDFDTPVSVIQQNAASPSFQPAASAIKLIDGVSTAAVNGQRIHTGNVVSLNNATVTLPNSSLYTTHPDNKGWLVETDPQFADYRRWLGSDYMLQQLQLDTNHLHKRLGDGYYEQKLVNEQIHQLTGYRRLDGYRSDEEQFKALMDNGLTAAKTFGLTPGIALSAEQVARLTSDIVWMENQTVTLSDGSTQTVLVPKVYALARKGDLNTSGGLISAEQVLLKLQNGNLTNSGTIAGRQAVLIQARNINSNGNIQADQIGLKAEKSINIDGGQVQAGRLLTAQAQNINLNGTTQTSGNERNGNTAIDRMAGINVVGSHTEQVDNRTSDGILSLHASNDINLNAATVSNQVKDGTTQITAGNNLNLGTIRTEHREAYGTLDDENHRHVRQSTEVGSSIRTQNGALLRAGNDLKIRQGELEAEEGKTVLAAGRDVTISEGRQITELDTSVSGKSKGILSSTKTHDRYRFSHDEAVGSNIGGGKMIVAAGQDINVRGSNLISDKGIVLKAGHDIDISTAHNRYTGNEYHESKKSGVMGTGGLGFTIGNRKTTDDTDRTNIVHTGSIIGSLNGDTVTVAGNRYRQTGSTVSSPEGRNTVTAKSIDVEFANNRYATDYAHTQEQKGLTVALNVPVVQAAQNFIQAAQNVGKSKNKRVNAMAAANAAWQSYQATQQMQQFAPSSSAGQGQNNNQSPSISVSITYGEQKSRNEQKRHYTEAAASQIIGKGQTTLAATGSGEQSNINITGSDVIGHAGTALIADNHIRLQSAKQDGSEQSKNKSSGWNAGVAVKIGNGIRFGITAGGNIGKGKEQGGSTTHRHTHVGSTTGKTTIRSGGDTTLKGVQLIGKGIQADTRNLHIESVQDTETYQSKQQNGNVQVTVGYGFSASGSYRQSKVKADHASVTGQSGIYAGEDGYQIKVRDNTDLKGGIITSSQSAEDKGKNLFQTATLTASDIQNHSRYEGRSFGIGGSFDLNGGWDGTVTDKQGRPTDRISPAAGYGSDGDSKNSTTRSGVNTHNIHITDEAGQLARTGRTAKETEARIYTGIDTETADQHSGHLKNSFDKDAVAKEINLQREVTKEFGRNAAQAVAAVADKLGNTQSYERYQEARTLLEAELQNTDSEAEKAAFRASLGQVNAYLAENQSRYDTWKEGGIGRSILHGAAGGLTTGSLGGILAGGGTSLAAPYLDKAAENLGPAGKAAVNALGGAAIGYATGGSGGAVVGANVDWNNRQLHPKEMALADKYAEALKREVEKREGRKISSQEAAMRIRRQILRWVDKGSQDGYTDQSVISLIGMKGEDKALGYTWDYRDYGARNPQTYNDPKLFEEYRRQDKPEYRNLTWLHSGTKDTKIRQGERKNEEFALNVAEGLTSLVNPNPRIKVPILAGIRNLKNIKPTVTGSDPLLAGAGNIRIPANGNVAKGDRIPDTALASKGIKHKNRKDQLEKNKKSGEDFEMEIYQKKVKQGFKPQRQITVKTKSGVKTRLDIISKEGGLDVCTECKASITAPLTKNQKKAFPEIERTGATVVGKGKPGYPKGTKIEPTKVIIERKR

SEQ ID NO: 1073 - protein, 161 aa, Neisseria
MNDYTAMPSEDGGIGSLSLPPHSMEAEQSVLGGLMLENPAWDRIADVVSGEDFYRHEHRLIFRSIAKLINESRPADVITVQEDLQRNEELEAAGGFEYLITLAQNTPSAANIRRHAEIVRERSIMRQLAEVGTEIARSAIPKISAAERAVAWSTKNSSSFF

SEQ ID NO: 1074 - protein, 327 aa, Neisseria
MLLTLHGTDKFCIVNNFHTNRNTAYKALKDACNNLFERQFSFIEKTPKGEKVVRTRWVSQVAYIEQQATVELVFAPNVAPLITMLEKNFTSYELDQVSSLSSKYAVRLYEIIISWRAAGKTPMFSTMELRERLGMMPDEYQKMELFKRKVLDFAVKQINDKTDISITYEQHKEGRKIVGFTFSILHKIGSKDIPLENQSELFAGMTDLEAGTIRVRAEAYIASLIAKGQNVTKAHRLNILKKAVEERWGFEDVAKDNGAKNPENKNAKVVLNEWEKISNGTRFKDKDGTIWVKDSGMLRTEGTNRWIADSQIAKLFPMLTVMVEEGI

SEQ ID NO: 1075 - protein, 559 aa, Neisseria
MEIINDAELIRSMQRQQHIDAELLTDANVRFEQPLEKNNYVLSEDETPCTRVNYISLDDKTVRKFSFLPSVLMKETAFKTGMCLGSNNLSRLQKAAQQILIVRGYLTSQAIIQPQNMDSGILKLRVSAGEIGDIRYEEKRDGKSAEGSISAFNNKFPLYRNKILNLRDVEQGLENLRRLPSVKTDIQIIPSEEEGKSDLQIKWQQNKPIRFSIGIDDAGGKTTGKYQGNVALSFDNPLGLSDLFYVSYGRGLAHKTDLTDATGTETESGSRSYSVHYSVPVKKWLFSFNHNGHRYHEATEGYSVNYDYNGKQYQSSLAAERMLWRNRLHKTSVGMKLWTRQTYKYIDDAEIEVQRRRSAGWEAELRHRAYLNRWQLDGKLSYKRGTGMRQSMPAPEENGGDILPGTSRMKIITASLDAAAPFILGKQQFFYATAIQAQWNKTPLVAQDKLSIGSRYTVRGFDGEQSLFGERGFYWQNTLTWYFHPNHQFYLGADYGRVSGESAQYVSGKQLMGAVVGFRGGHKVGGMFAYDLFAGKPLHKPKGFQTTNTVYGFNLNYSF

SEQ ID NO: 1076 - protein, 1978 aa, Neisseria; identical to SEQ ID NO: 476

SEQ ID NO: 1077 - protein, 169 aa, Neisseria
MSNFEKKYILELNDALSHLNHNSTSFDLLKVLISWLSNDIVIDKFKILGYDFSKYIEMNPDDYPVEKSILNREEIIYLKNNIYRKISSGNFKFQYFVQYIRDILEYLFIEHIERVCPYCEWGEMQKLEEQNTHETVYLCTQCGCAFYNDNSQFLLKTPLTIPMKRDEFK

SEQ ID NO: 1078 - protein, 540 aa, Neisseria
MQVNIQIPCMLYRRGSVKPPLFEAPRLLPSFTDPVVPKLSAPGGYIVDIPKGNLKTEIEKLAKQPEYAYLKQLQVAKNVNWNQVQLAYDKWDYKQEGLTRAGAAIIALAVTVVTAGAGVGAALGLNGAAAAAADAAFASLASQASVSLINNKGDVGKTLKELGRSRTVKNLVVAAATAGVSNKLGASSLATWSETPWVNNLNVNLANAGSAALINTAVNGGSLKDNLEANILAALVNTAHGEAASKIKGLDQHYVAHKIAHAVAGCAAAAANKGKCQDGAIGAAVGEIVGEALVKNTDFSDMTPEQLDLEVKKITAYAKLAAGTVAGVTGGDVNTAAQTAQNAVENNAVKAVVTAAKVVYKVARKGLKNGKINVRDLKQTLKDEGYNLADNLTTLFDETLDWNDAKAVIDIVVGTELNRANKGEAAQKVKEVLEKNRPYIPNKGAVPNMSTYMKNNPFGKQLAQISEKTTLPTQQGQSVFLVKRNQGLLKTGDRFYLDGQHKNHLEVFDKNGNFKFVLNMDGSLNQMKTGAAKGRKLNLK

SEQ ID NO: 1079 - protein, 125 aa, Neisseria
METLNDIKKILINVGLYQGFDLTDPKVSEEVNHETANMKWIKDYTSDGNWDNEFKEDLKNFLDYMEVCQLALNDKNFKIASNSLFMAMIYAGNLSLIFDSIKTDISTLLSAEYKKNSFSWPSLDE

SEQ ID NO: 1080 - protein, 124 aa, Neisseria
MKNFNVVKESLRELGIKQGFDLYEKATTEKLNSEDPLDLQWLSNYSSDWNDELEEDFDSFFQHMKEYQYAIDNEDIKSACSSLCEAMLYVGNIKNFFEFLKSDMIRLLRGESKTTDFQWPQFDE

SEQ ID NO: 1081 - protein, 650 aa, Neisseria
MRKVCASARTRSMIYGSMPSEKLTIFQTAFVMQVNIQIPYILPRCVRAEDTPYACYLKQLQVTKDVNWNQVQLAYDKWDYKQEGLTGAGAAIIALAVTVVTAGAGAGAALGLNGAAAAATDAAFASLASQASVSLINNKGNIGNTLKELGRSSTVKNLMVAVATAGVADKIGASALNNVSDKQWINNLTVNLANAGSAALINTAVNGGSLKDNLEANILAALVNTAHGEAASKIKQLDQHYITHKIAHAIAGCAAAAANKGKCQDGAIGAAVGEIVGEALTNGKNPDTLTAKEREQILAYSKLVAGTVSGVVGGDVNAAANAAEVAVKNNQLSDKEGREFDNEMTACAKQNNPQLCRKNTVKKYQNVADKRLAASIAICTDISRSTECRTIRKQHLIDSRSLHSSWEAGLIGKDDEWYKLFSKSYTQADLALQSYHLNTAAKSWLQSGNTKPLSEWMSDQGYTLISGVNPRFIPIPRGFVKQNTPITNVKYPEGISFDTNLKRHLANADGFSQKQGIKGAHNRTNFMAELNSRGGRVKSETQTDIEGITRIKYEIPTLDRTGKPDGGFKEISSIKTVYNPKKFSDDKILQMAQNAASQGYSKASKIAQNERTKSISERKNVIQFSETFDGIKFRSYFDVNTGRITNIHPE

SEQ ID NO: 1082 - protein, 143 aa, Neisseria
MKNNIFLNLNKKSINNNHFVISIFFETIYQFETKDTLLECFKNITTTGHFGVIGAQYEKIDATRWIGDYEEVNGFEYIDKAPSIYFSVGDDFNPEELIIPINLAYHYFNIAISDFLIAHPEYQKKCKEIQKTYSQTNCSLHET

SEQ ID NO: 1083 - protein, 71 aa, Neisseria
MPMRTVASCSAPRISVRKTAKSKFNLTVTNITMRDRANSIPLNAAATKLANGTTANTLPKSKNTKTPSPTQ

SEQ ID NO: 1084 - protein, 94 aa, Neisseria
MLLPRPACFCHRVDLLLLTVSVWMLLLIPSRIILASARACSPTPARMVAPPSVVSNCVPCSLVSQPDCRLADSATTLEGSAVFMTWVVVSCALL

SEQ ID NO: 1085 - protein, 506 aa, Neisseria
MTPAAAAVVVIVVTVLTYGALSAPAAAGTAGAAGAGAGGAAAGTAAGTGVAAGTAATTGVAAGTSAAAITTAAGKAALASLASQAAVSLINNKGDINHTLKELGKSSTVRQAATAAVTAGVLQGISGLNTQAAEAVSKHFHSPAAGKLTANLINSTAAASVHTAINGGSLKDNLGDAALGAIVSTVHGEVASKIKFNLSEDYIAHKIAHAVAGCASAVANKGKCRDGAIGAAVGEMVGETLLDGRDVGKLSPQERQKVIAYSQIIAGSAVALVKGDVNTAANAATVAVENNSLLARRRVNIRWTSRQELEHEYAILEIQAITNQIRRLDPKFNGIAIMRNPREPWTRHDVQTYRQYYNQLRESRGFAVDPIYRIRINNGNEFNRIMSSKYPYNELYVANPKSATGYFRVDSYNPATEEIISRKFTQFSQIQESTGIGYIKEAVRKYSPGAVISNVPSTPTTIRGRKLEGKLILEVPAQVNPIPQSVLRAAQEENVIIRDTTGRIYK

SEQ ID NO: 1086 - protein, 162 aa, Neisseria
MKKDIFYCEQWSYGYKKLHKPFSEKQAEEKHLKGELYTAVIGSATQPEYVITLREEVGFFSVHFFDKFGRDYLTHQFQKYSNSNYYFLSMAVWRDYITLESHDLAEGYTYFFNENTDDCYVLKEDFINNERYEKTELYSQKDKVILFPKFGEYDLVLNPDII

SEQ ID NO: 1087 - protein, 90 aa, Neisseria
MNKRMKMCPACQQGYLYHSKPKYLHDEIILCDECDAVWLKGMNIFYGEYEKDFYSYVPFMESQGITSECIWEGDLFDHPYYEDENSNDMD

SEQ ID NO: 1088 - protein, 260 aa, Neisseria
MGEIVGEALVKNTDFSGMTASEIEKAKANITAYAKLVAGATVGVTGGNVDVAANASETAVKNNALDIIWDIGNLVWDGGKWIYAKSIGDKQMAREAAIDFGVDAAAAAVPFVPAGATKISRGGAYVLKAGDEAVDTAKAIQEIQKQTGIKLTYDKVNKVWTTPAGLDYGLDAKHGNRIKHVLAHTIPNPNKPVHSVFNVSRKEVLPLVDEAWRMKGNPLPNDSSVYLVDMKKPIGTKGETKVRIVVQKGTNKIISAYPQK

SEQ ID NO: 1089 - protein, 87 aa, Neisseria
MDKEIKICPRCEQGYLYHAKPKYFSGEVILCDECYAMWLGDMKIFYGQYGKDFYDYHEFMKDKGIEEINMWEGELFDHPYYEDEKFK

SEQ ID NO: 1090 - protein, 640 aa, Neisseria; identical to SEQ ID NO: 456

SEQ ID NO: 1091 - protein, 140 aa, Neisseria
MKYMISFLKKTFELMSWVLVILIIGTFYDYYQIRQYAELEKKSISNILLYAQKEKFRLESKDKYMRGGYTKYKFIFSEYSNTTFLNFINDLKKDNYLPLDGYGHGFLCRKGESISINIYPEINKFILVWGYPENLCADSN

SEQ ID NO: 1092 - protein, 133 aa, Neisseria
MRKLNNHDVHKRYQDRLEEDVEFTINYELPLSCLWSTIKDFSSDFEEKTEAFFILFKELLRRGHLKLQRDGQIIGHTPEEWEQIFREVWPEYEIEPNPLPGYAPFDIGMWLTVEAPAYAVWIDPEDGSEYWAG

SEQ ID NO: 1093 - protein, 79 aa, Neisseria
MLGVVPGIGESIQAYKVAKAAKNLQGMKKALDKAATVATAQGYVSKTKIKIGQTELRVTAATDKQLLKAIGEGRTRQVK

SEQ ID NO: 1094 - protein, 127 aa, Neisseria
MTEQLFDSLAKQNGFRVLSGGKYGGNNGFDHVWQAADGSVVLIVESKQIRNGTVQLNPNGAGGYTQMSREWIKQVVKSLPDGSPAKAVVLKANQNGKLKTAIAGVDRQTGKAVILSVKVPSKTNIRR

SEQ ID NO: 1095 - protein, 311 aa, Neisseria
MGHNMMTTQKWYEHITNVIIGNTANFNSGCPESIDYVDEKKGVPLAAMKYILMYTEAAASHAYLFEHDLKKFKQYAYVAGKLGILQSVDDEDPEPFFFPCDMLNIQDPMFLMLMSDSPQLREFLVRNIDNIANDTEAFVNRYDLNRHMIYNTLLMVEGKQLDRLKQRSEKVLAHPTPSKWLQKRLYDYRFFLAFAEQDAEAMKAALEPLFDKKTARMAAKETLSYFDFYLQPQIVTYAKIASMHGFDLGIDHEIAPRDLTVYDPLPADEYQDIFDFMKQYDLSYPYEYLQDWIDYYTFKTDKLVFGNAKRE

SEQ ID NO: 1096 - protein, 51 aa, Neisseria
MLLQRSHALFCQQVEFFSGNQRGKASPQHRSMYYGRASIYSFRKSFSFKTA

SEQ ID NO: 1097 - protein, 83 aa, Neisseria
MKIFWRIFMRQISLTDYFCKGLRFKHIAFRWFAYSLCHFQCSKYTCSAKRKKTYRKTYFRSSCSGQSNSTICIKGGTRRKCYH

SEQ ID NO: 1098 - protein, 67 aa, Neisseria
MLSLEIQQEGFTIGGGLVLGGCAGAHLARKEPLILTGKTGAGASAIANASIGYQWTVNLSKPKEGAK

SEQ ID NO: 1099 - protein, 59 aa, Neisseria
MHSHYIFGILMISYVFAMLFNFIISYKIFKEEKLINGFFDFLIKSSYLNFKYFNILFGK

SEQ ID NO: 1100 - protein, 152 aa, Neisseria
MLTKLKILLFLFLFVFVLAINLLFFFFSSDIESFGNYQFEYVYDKGWPANYILVMKDGNEGNFDKIISGLVLEYYKEDDNIYFSYIDGQGFASDSCYYKPEILYGKIILNKNHIININSMEKNNFLSEDKIMKGTRNWLADPKNKCNIQTLD

SEQ ID NO: 1101 - protein, 41 aa, Neisseria
MRKYNGIDRKSFPLFLKECEFRFNFGTPSQQLKILRDWCGI

SEQ ID NO: 1102 - protein, 406 aa, Neisseria; identical to SEQ ID NO: 311

SEQ ID NO: 1103 - protein, 219 aa, Neisseria
MSNQQALVIFSGGQDSTTCLIQAIQTYGRENVQAITFQYGQRHAVELERARWIAQDLGVKQTVLDLSLMRQITHNALMDDTAAIETAENGVPNTFVDGRNALFLLYAAIYAKGQGIRHIIAGVCETDFSGYPDCRDVFVKSMNVTLNLAMDYDFQIHTPLMYLTKAQTWALADEMGVLDYIREQTHTCYNGIVGGCRECPSCILRERGLAEYLESKKAV

SEQ ID NO: 1104 - protein, 172 aa, Neisseria
MPKLHMFYLGGNAGRSNIEVHDIQFAVCDNYREAVPALKAAWFGDADKIHIDGWQIVEWADGYDIAVSETPKTKMPSEHAPRLYFANVGGYRAGQLAEAHAFGLFAAATPAEAKQKALQTLLTDSYVQQHKDNLKDVDNLLALDRIGNFHIRLTPNPHGKPAEIGFQGYLPI

SEQ ID NO: 1105 - protein, 140 aa, Neisseria
MKITKIFTFDSSHMLDGHDGKCQNLHGHTYKLEITVSDGIIKGGAKDGMVMDFTDLKAIVKQHITDPFDHAFIYHGGNSRECQIAALLEGWNMKTLRLPCRTTAENMAVEMYGRLKNAGLNVCRVKLWETPTSCAEYEGE

SEQ ID NO: 1106 - protein, 123 aa, Neisseria
MKLLFILLVLFVAVEHFYIAWLEMTQIPSEKAAEIFKLPYEFMEQKQVQTLFSNQGLYNGFLGIGLVWSRFAAPDNAVYGATTLFLGFVLIAAAWGAFSSGNKGILVKQGLPAMLAAAAVLAV

SEQ ID NO: 1107 - protein, 212 aa, Neisseria
MKKINVAPENPQYRIVEIFESLQGEGWNTGMPAVFVRLGKCNLACGWCDTDYLTFGMMGLSDILGRLKTYAARNIIITGGEPTIQPHLDMLLDTLKAEGYFLCLETNGLNPAPPQIDYVATSPKACYAAKYENSCIETADEVRIVADGDVLAFCENMERKIRAHHYYLSPCEQDGAMNIYDTIRQIGILNSRPDASVHWQLSVQTHKWAGIE

SEQ ID NO: 1108 - protein, 361 aa, Neisseria
MTVPHIPRGPVMADIAAFRLTEEEKQRLLDPAVGGIILFRRNFQNIEQLKTLTAEIKALRTPELIIAVDHEGGRVQRFIEGFTRLPAMSTLGEIWDKDGASAAETAAGQVGRVLATELSACGIDLSFTPVLDLDWGNCPVIGNRSFHRNPEAVARLALALQKGLTKGGMKSCGKHFPGHGFVEGDSHLVLPEDWRSLSELETADLAPFRIMSREGMAAVMPAHVVYPQVDTKPAGFSEIWLKQILRRDIGFKGVIFSDDLTMEGACGAGGIKERARISFEAGCDIVLVCNRPDLVDELREDFRIPDNPTLAQRWQYMANTLGSAAAQAVMQTADFQAAQAFVAGLASPQDTAGGVKVGEAF

SEQ ID NO: 1109 - protein, 506 aa, Neisseria; identical to SEQ ID NO: 346

SEQ ID NO: 1110 - protein, 499 aa, Neisseria
MFKKYQYLALAALCAASLAGCDKAGSFFGADKKEASFVERIEHTKDDGSVSMLLPDFAQLVQSEGPAVVNIQAAPAPRTQNGSGNAENDSDPIADNDPFYEFFKRLVPNMPEIPQEEADDGGLNFGSGFIISKDGYILTNTHVVTGMGSIKVLLNDKREYTAKLIGSDVQSDVALLKIDATEELPVVKIGNPKDLKPGEWVAAIGAPFGFDNSVTAGIVSAKGRSLPNESYTPFIQTDVAINPGNSGGPLFNLKGQVVGINSQIYSRSGGFMGISFAIPIDVAMNVAEQLKNTGKVQRGQLGVIIQEVSYGLAQSFGLDKAGGALIAKILPGSPAERAGLQAGDIVLSLDGGEIRSSGDLPVMVGAITPGKEVSLGVWRKGEEITIKVKLGNAAEHIGASSKTDEAPYTEQQSGTFSVESAGITLQTHTDSSGGHLVVVRVSDAAERAGLRRGDEILAVGQVPVNDEAGFRKAMDKAGKNVPLLIMRRGNTLFIALNLQ

SEQ ID NO: 1111 - protein, 209 aa, Neisseria
MNRHIRQEIFERFRAANPHPTTELNFNSPFELLIAVLLSAQATDVGVNKATAKLFPVADTPQAMLDLGLDGVMEYTKTIGLYKTKSKHIMQTCRILLEKYNGEVPEDREALESLPGVGRKTANVVLNTAFGHPVMAVDTHIFRVSNRTKIAPGKDVREVEDKLMRFIPKEFLMDAHHWLILHGRYTCKALKPQCQTCIINDLCEYPAKA

SEQ ID NO: 1112 - protein, 137 aa, Neisseria
MIPSYTYAALAFSAFTSATLLPGTSEAAFALFVHRFPEHAYGALLCAGLANGLGSMVSYWMGRLLPSRKMPSEKTLNLMRRFGIWLLAFTWLPVVGDALPLAAGWLRLNPWTSGLMLVIGKTARYAFILWGMQYYAA

SEQ ID NO: 1113 - protein, 426 aa, Neisseria
MSISIFLKRVIFRHHERQIMSAQSQNNHTSPLVVLTTLFFMMGFITCMNDILIPHLKEIFDLSYVQAMLIQFCFFTAYAVMSIPMGAFVGKVGYKNGVIGGFLLTAVGCLLFYPAAGSHSYAVFLGALFILASGVTLLQVAGNPYVTLLAKPGKESATLTLVQAFNALGTTIAPQIGAFLILADATQTVSKAEQISSVQIPYLGLAGLLIILAVFVKMIRLPDARKIAAEESAHNHDGKTSVWQYKHLVFGTAGIFCYVGAEVSIGSLMVNVLGYLKGLDHASAAHYLSFYWGGAMVGRFLGSAVMAKFAPNRYLAFNASAAVVLLAVAMATGSGNADVAMWSLLAIGFFNSIMFPTIFSLATKGLGKFTNAASGVLCTAIVGGAVVPVVQGWVADTYTLMSSFVVSVICYLYIVFFAVYGYRADK

SEQ ID NO: 1114 - protein, 459 aa, Neisseria
MFAFKSLLDMPRGEALAVVVALIAAMGYTIISLEWLPHMSIIAAIVVLILYGLARGLKYNDMQQGMIGALNQGMGAIYLFFFIGLMVSALMMSGAIPTLMYYGFGLISPTYFYFSSFALCSVIGVSIGSSLTTCATVGVAFMGMAAAFQADMAMTAGAIVSGAFFGDKMSPLSDTTGISASIVGIDLFEHIKNMMYTTIPAWLISAALMLWLLPNVAAQDLNSVESFRSQLEATGLVHGYSLIPFALLVILALMRINAVVAMLFTVMVAVAVTYLHSTPDLRQLGAWFYGGYKLEGEAFKDVVKLISRGGLESMFFTQTIVILGMSLGGLLFALGVIPSLLEAIRTFLTNAGRATFSVAMTSVGVNFLIGEQYLSILLSGETFKPVYDKLGLHSRNLSRTLEDAGTVINPLVPWSVCGVFISHALGVPVWEYLPYAFFCYLSLALTLLFGWTGLTLSKK

SEQ ID NO: 1115 - protein, 274 aa, Neisseria
MDGAQPKTNFFERLIARLAREPDSAEDVLNLLRQAHEQEVFDADTLLRLEKVLDFSDLEVRDAMITRSRMNVLKENDSIERITAYVIDTAHSRFPVIGEDKDEVLGILHAKDLLKYMFNPEQFHLKSILRPAVFVPEGKSLTALLKEFREQRNHMAIVIDEYGGTSGLVTFEDIIEQIVGEIEDEFDEDDSADNIHAVSSERWRIHAATEIEDINTFFGTEYSSEEADTIGGLVIQELGHLPVRGEKVLIGGLQFTVARADNRRLHTLMATRVK

SEQ ID NO: 1116 - protein, 169 aa, Neisseria
MKRTKKYPFLTLQRQRFHLNFENASSAAGIPAERDFYRWAWSALKNEYRRADISLILLDEEEARAYNRDYRGKDYATNVLSFALNEGEILPCQVSEKLYGDLIICPQVVLKEAAEQGKTPEQHFAHLTIHGTLHLMGYDHIEDDEAEIMEAEEIRLMRAAGFPNPYQED

SEQ ID NO: 1117 - protein, 311 aa, Neisseria
MNPKKLVIASRESLLAMWQAKHIQGRLKALYPDCEVEILGMTTRGDQILDKTLSKVGGKGLFVKELEQALYDGRADLAVHSIKDVPMDLPEGFALAAIGERANPFDAFVSNQYTRLEEMPEGAVVGTSSLRREAQLRARYPHLLIKPLRGNVQTRLSKLDNGEYDAIILAAAGLQRLKLDGRIRMILSESDSLPAAGQGALGIEIAAHREDLYEVLKPLNHGVTNACVTAERALARALGGSCQVPLAAYCTEENGLLTLRGLVGHPDGSVVLRADAQAPAEYADALGRAVAKKLADDGARELIGAVLNTEN

SEQ ID NO: 1118 - protein, 397 aa, Neisseria
MFFKHIEAAPADPILGLGEAFKAETRPEKVNLGIGVYKDASGATPLVKAVKEAEKRLLESETTKNYLTIDGVADYNAQTQILLFGKDHEIIASRRAKTAQSLGGTGALRIAAEFAKRQLNAQTIWISNPTWPNHNAIAKAVGIQDKPYRYYDAAKHGLDWDGMIEDLSQAQKGDIVLLHGCCHNPTGIDPTPEQWETLAKLSAEKGWLPLFDFAYQGFGNGLEEDAYGLRVFLKHNTELLIASSYSKNFGMYNERVGAFTLVAEDEETAARAHSQVKTIIRTLYSNPASHGANTIALVLKNDDLKAQWIAELDEMRGRIKAMRQKFVGLLKAKGASQNFDFIIKQNGMFSFSGLTPEQVDRLKNEFAIYAVRSGRINVAGITDNNIDYLCESIVKVL

SEQ ID NO: 1119 - protein, 165 aa, Neisseria
MTALTLPEDIRQQEPSALLYTLVSAYLEHTAQTGDESLSCLSDDQHTLTAFCYLDSQVEEGGFVQLIASGYGEYIFRNPLADSLRRWKIKAVPKVLDKAKALYEQHGKTIETLADGGADIPSLRKQFPEFEEWDGAYYEAAEQDLPLLAEHIQSNWETFAHIGQA

SEQ ID NO: 1120 - protein, 67 aa, Neisseria
MDNLNPQEISVLPENLPLYCSGPGNEQWNGHPRVFLPLCEGESGSVACPYCGTRYRLDGKMPHHHYA

SEQ ID NO: 1121 - protein, 528 aa, Neisseria
MALFLSIFPIVLLIWLMVKKNSMPSYVALPITAVLIYAIKLFYFDDAGMLLNATAASGLVKTLTPITVIFGAIMFNRMMETTGCIDVIRKWLATISPNPVAQLMIIGWAFAFMIEGASGFGTPAAIAAPILMSLGFNPLKVAIFTLVMNSVPVSFGAVGTPTWFGFAPLNLSAEDILAIGRQTGVMHFFAGFVIPVIGLGFIVPWSEIRKNLGFVAIAVFSCTIPYVALAMVNEEFPSLVAGAIGLMVSVFAANQGWGLSKDHAKDPNAEKVPFAQVAKALAPLGMLIGMLVVTRIKQLGIKGILTSKEEWFSFQLPFDLSKITVSDSLTITFGNIFGQDVSASYQTLYVPAWIPFVLTVWICILLYKTKFKDAWTIYSVTFNQTKKPLLALMGALIMVQLMLVGGDNSMVKIIGKEFAAMAGEHWVYFSPYLGAIGAFFSGSNTVSNLTFGPIQQQIALDTGLSVTLILALQSVGGAMGNMVCLNNIIAVCTVLDVKNSEGAIIKKTVIPMAIYGVIAVVAAMIFFL

SEQ ID NO: 1122 - protein, 240 aa, Neisseria
MKPAYFISDLHLSEKQPELTALLLRFLRSSAAGQARAIYILGDLFDFWVGDDEVSELNTSVAREIRKLSDKGVAVFFVRGNRDFLIGQDFCRQAGMTLLPDYSVLDLFGCKTLICHGDTLCTDDRAYQRFRKIVHRKRLQKLFLMLPLKWRTRLATKIRRVSKMEKQVKPADIMDVNAAFTARQVRAFGAERLIHGHTHREHIHHENGFTRIVLGDWHNDYASILRVDGDGAVFVPLEKY

SEQ ID NO: 1123 - protein, 1161 aa, Neisseria
MRLTHIKLSGFKSFTDPTTIHVPGQLVAVIGPNGCGKSNVIDAVRWVLGEASAKQLRGESMQDVIFNGAATRRPAPRASVELVFDNSDHSLQGAWGQYAEVSIKRQLTRQGESTYFINNQTVRRRDITDLFLGTGVGARGYAVIEQGMISRIIEARPEELRAYIEEAAGVSKYKERRKETEGRLKDTREHLQRLGDLQNELARQVEKLEKQAETAERYKSLTAQLNQQQDLLDYAQWRQSLAAADKATAQHQSLQAQQDETAAQVQALNDEVHALQTAEQSQQQAVHELSNKRGVLREQIARLEEQIRHQQNLHQRIERDKQAAQAQLQRIHQEQQQIRVQLEENELQVEEKQTELAEWAMQVAEHEERLPELEEAQATLNAAFQTQQDEANRIRRELALKQQQLAHAEQTIAKHEERKGRLKQENQALNLPDEAETAAAQEAAALLQSQQEHYEEQIIAAEEALHAAREAFQTASNRFQSLKQQHITLQAQQQALSQILSQQQEAADFWQATDHAAAPQLWQHITAPAEWQHALSVILAERLHARAVPQGFVPPEPLPQGQAAWLSDDLSGGIKKSLPVQALLNQIQAQPPFQTALHYWLDGVLCAPDLSYALAHQNDLGAHQIWLTPEGHQVDKVSVLLYAKPAQESLIAQKARLDGIASELENLAPELSAAEAAFKQAEAAVRSSEVQHKNLMQQQQQHTRQYSQAQQRAAELLARTNQGQIRREHIERELAQLAEEQTVLQHTSDGLSDDIVTLQEAAAELEHQQQTTAHSRQEQQGRLKQAQLALLEANRQYGLAEVAVHKLNQQKQNYRQQIAQLEQQTLDWQERQQELALAYETEFQNDEQHIKLEELSEAVQTLDEEYIVVQEKLAQIQEQGREQYAKVQTLQTKLPQLQAATQTALLQQQEALINAKRYHQNLTERAADLDALEALAKESPKVLNSSIGSLSQQIEALGAVNLAALQELEEARERDGYYRSQSEDVQAAITLLEEAIAQIDDKTKARFKETFDAVNSKVQTFFPTLFGGGEATLKMIGDDLLTAGVSIMARPPGKKNSTIHLLSGGEKALTAMSLVFALFSLNPAPFCLLDEVDAPLDDANTSRFCRLVKEMSAQTQFLYISHNRLTMEMAEQLVGVTMQEKGVSRVVAVDIKQALEMAEAV

SEQ ID NO: 1124 - protein, 348 aa, Neisseria
MKMQAVVVNKNVAGDVEVIEREVRPLEYGEALVEVEYCGVCHTDLHVAAGDYGEKPGRVLGHEGIGLVKEVADGVKNLKVGDRVSIAWLFQSCGSCEYCNTGRETLCRSVLNAGYTADGGMATHCIVSADYAVKVPEGLDPAQASSITCAGVTTYKAIKVSGVRPGQWIAIYGAGGLGNLGVQYAKKVFGAHVVAIDINDDKLAFAKETGADLVVNAAKEDAAKVIQEKTGGAHAAVVTAVSAAAFNSAVNCVRAGGRVVAIGLPPESMDLSIPRLVLDGIEVVGSLVGTRKDLEEAFQFGAEGLVVPKVQLRALDEAPAIFQEMREGKITGRMVIDMKKECGCGHHH

SEQ ID NO: 1125 - protein, 129 aa, Neisseria
MKNVQKGFTLLELMIAVAILGILTLITYPSYKTYIRRVRLSEVRTTLLHNAQTMERYYRQKGTFKTYDKNKLKQNEYFDITLSEVSPDHFTLQADPNPTTNDGETCVVTLNDGGTIAASGTNQSCPGFD

SEQ ID NO: 1126 - protein, 392 aa, Neisseria
MAKMMKWAAVAAVAAAAVWGGWSYLKPEPQAAYITETVRRGDISRTVSATGEISPSNLVSVGAQASGQIKILYVKLGQQVKKGDLIAEINSTSQTNTLNTEKSKLETYQAKLVSAQIALGSAEKKYKRQAALWKENATSKEDLESAQDAFAAAKANVAELKALIRQSKISINTAESELGYTRITATMDGTVVAILVEEGQTVNAAQSTPTIVQLANLDMMLNKMQIAEGDITKVKAGQDISFTILSEPDTPIKAKLDSVDPGLTTMSSGGYNSSTDTASNAVYYYARSFVPNPDGKLATGMTTQNTVEIDGVKNVLIIPSLTVKNRGGKAFVRVLGADGKAAEREIRTGMRDSMNTEVKSGLKEGDKVVISEITAAEQQESGERALGGPPRR

SEQ ID NO: 1127 - protein, 644 aa, Neisseria
MSLIECKNINRYFGSGENRVHILKDISLSIEKGDFVAIIGQSGSGKSTLMNILGCLDTAGSGSYRIDGIETAKMQPDELAALRRERFGFIFQRYNLLSSLTARDNVALPAVYMGAGGKERSARADKLLQDLGLASKEGNKPGELSGGQQQRVSIARALMNGGEIIFADEPTGALDTASGKNVMEIIRRLHEAGHTVIMVTHDPDIAANANRVIEIRDGEIISDTSKNPEIPASNVGRIREKASWSFYYDQFVEAFRMSVQAVLAHKMRSLLTMLGIIIGIASVVSVVALGNGSQKKILEDISSIGTNTISIFPGRGFGDRRSGRIKTLTIDDAKIIAKQSYVASATPMTSSGGTLTYRNTDLTASLYGVGEQYFDVRGLKLETGRLFDENDVKEDAQVVVIDQNVKDKLFADSDPLGKTILFRKRPLTVIGVMKKDENAFGNSDVLMLWSPYTTVMHQITGESHTNSITVKIKDNANTQVAEKGLTDLLKARHGTEDFFMNNSDSIRQIVESTTGTMKLLISSIALISLVVGGIGVMNIMLVSVTERTKEIGIRMAIGARRGNILQQFLIEAVLICVIGGLVGVGLSAAVSLVFNHFVTDFPMDISAMSVIGAVACSTGIGIAFGFMPANKAAKLNPIDALAQD

SEQ ID NO: 1128 - protein, 260 aa, Neisseria
MKTKLIKILTPFTVLPLLACGQTPVSNANAEPAVKAESAGKSVAASLKARLEKTYSAQDLKVLSVSETPVKGIYEVVVSGRQIIYTDAEGGYMFVGELINIDTRKNLTEERAADLNKIDFASLPLDKAIKEVRGNGKLKVAVFSDPDCPFCKRLEHEFEKMTDVTVYSFMMPIAGLHPDAARKAQILWCQPDRAKAWTDWMRKGKFPVGGSICDNPVAETTSLGEQFGFNGTPTLVFPNGRSQSGYSPMPQLEEIIRKNQ

SEQ ID NO: 1129 - protein, 729 aa, Neisseria
MIYHRIAVNVPLSDGLLTYSHSDPLPPGTRVLVPFRNKTVVGMVWETDIAPDMDMARILSVQTAFVEEKPLPESWRDLLAFTSRYYHYPTGQAVFAALPQGLKETRAVEMPQPPLFYALNEAGRAQTPPPARFNKKAALWDALLSGGMTMAALKQVNAQAAKLIEDWAEQGWIETTEAAKPVLRSYHGQASHSEFVLNADQQQASDEIQTAFGSFQPFLLYGITGSGKTEVYFDAMAKVLAQGRQVLFLLPEINLTPQLLKRVENRFADVPTAVLHSQMAAGKRTQDYLRAMLGQAKLVIGTRLAVFTPMDDVGLIVVDEEHDGSFKQDNELRYHARDLAVWRAKQGGCPIILGSATPSLESWHKAQSGAYRLLQLTERAHTAAQLPQVDILNVGRLKLDNGFSPQALQLLKQNFEAGGMSLVYLNRRGFAPALFCGDCGYTFGCPNCSAKMVLHQRARQLRCHHCDHREPIPYKCPDCGNQDLTAVGHGTQRVEETLRTFLPKAAVVRVDRDSTAHKNDWADLYRRIADNKIDILVGTQMLAKGHDFARLNLVIVLNADGSLYSADFRAPERLFAELMQVSGRAGRADKPGKVLIQTQLPEHPVFAAVKAQDYAVFAENELNERQMFAMPPFGFQTAVRADAPRVADAMEFLNAAKETLAPLLPESVSQFGAAPMLMVRLAERERAQIFLESPSRQDLHRAVSLWAQVLQQNRDGKIRWSVDVDPQEA

SEQ ID NO: 1130 - protein, 357 aa, Neisseria; identical to SEQ ID NO: 424

SEQ ID NO: 1131 - protein, 642 aa, Neisseria
MAKVIGIDLGTTNSCLAISENGQTKVIENAEGARTTPSVIAYLDGGEILVGAPAKRQAVTNAKNTIYAAKRLIGHKFEDKEVQRDIESMPFEIIKANNGDAWVKAQGKELSPPQISAEVLRKMKEAAEAYLGEKVTEAVITVPAYFNDSQRQATKDAGRIAGLDVKRIINEPTAAALAFGMDKGDNKDRKVAVYDLGGGTFDISIIEIANLDGDKQFEVLATNGDTFLGGEDFDQRLIDHIIAEFKKEQGIDLKQDVMALQRLKEAAEKAKIELSSGQQTEINLPYITMDATGPKHLAMKITRAKFESLVEDLITRSIEPCKIALKDAGLSTGDIDDVILVGGQSRMPKVQEAVKAFFGKEPRKDVNPDEAVAVGAAIQGEVLSGGRSDVLLLDVTPLSLGIETMGGVMTKLIQKNTTIPTKASQVFSTAEDNQSAVTIHVLQGERERASANKSLGQFNLGDIAPAPRGMPQIEVTFDIDANGILHVSAKDKGTGKAANITIQGSSGLSEEEIERMVKDAEANAEEDKKLTELVASRNQAEALIHSVKKSLADYGDKLDAAEKEKIEAALKEAEEAVKGDDKAAIDAKTEALGAASQKLGEMVYAQAQAEAQAGESEQANASAKKDDDVVDADFEEVKDDKK

SEQ ID NO: 1132 - protein, 90 aa, Neisseria
MKKTGKYLIYTAAFTAFCFAFQENRSEAKQPDITLSASLCEQFNILNAKDMDAEQVSLSKECDIIESSHDWEKEYGNLNEQEMLAGIVYE

SEQ ID NO: 1133 - protein, 228 aa, Neisseria
METFKDRLVFLWKSEARQAKIASDIEMTIAGFSRIWNEGGLPKSETLKKIKQLKGCSIDWLLTGEGNPFPDEAPKKSLAYDTLGNEVDTDEFVFVPRYDIRAAAGYGQFVDHEEPVFTMAFRRHWIENYVTRDTKNLSVISVKGDSMEGVLNDGDSILVNHGENTPRDGLYVLRINENLLVKRLQIVPGGIINVISANEAYPAFEINLNDLTDDVEIIGRVEWFGRTI

SEQ ID NO: 1134 - protein, 112 aa, Neisseria
MSDESPIIFTDSCCAKVADLIAEENNPDLKLRVFVNGGGCSGFQYGFTFDEIKNDDDFEIEKNGLVFLVDPMSYQYLVGAEIDYTESLQGSQFVIRNPNAETTCGCGSSFSV

SEQ ID NO: 1135 - protein, 154 aa, Neisseria
MIEMSKDYRNDLYDVYVSYPPQVDRGLIRECLKENLGEEKAEGLIESLDSKPQVLVEEKCTWAKREELHDYFSYLGLDIITRRYMELETVVPPEEGEGEGEGADGEMPEYLELHGGREDDISAPSQPEPPSRNIKLLVFGLLIAFLGYLLGKIF

SEQ ID NO: 1136 - protein, 503 aa, Neisseria
MKWLKRLTVIVGTFYRYRLAGLCASLMGSGWICALLKMMPQSSKLKNEPPAVRLRLALESLGPIFIKFGQVLSTRPDLIPHDYAVELAKLQDKVPPFDARLSREQIEKSLGQSIEKLYAEFETEPIASASIAQVHKARLHSGEQVAVKVLRPNLLPVIEQDLSLMRFGAGWVERLFADGKRLKPREVVAEFDKYLHDELDLMREAANASQLGRNFQNSDMLIVPKVFYDYCTSDVLTIEWMDGTPVSDIAKLKADGIDLHKLADYGVEIFFTQVFRDGFFHADMHPGNILVAADNRYIALDFGIVGTLTDYDKRYLAINFLAFFNRDYRRVATAHIESGWVPADTRAEELEAAVRAVCEPVFNKPISQISFGLVLMRLFEVSRRFNVEIQPQLVLLQKTLLNIEGLGRQLDPDLDLWKTAKPFLVKWMNGQVGPKALWRNLKNEAPDWAQIIPSLPRKISALIDENRQQEMRDAYIHLVKVQQRQSLWLAVIAVVLLLILLLK

SEQ ID NO: 1137 - protein, 272 aa, Neisseria
MKKDHLNTTGFDLWHTIREETAAAVSAEPMLASFLHQTVLRHESLGSVLAYHLSSKLGSPIMDVRALFEIYQQALGSDTQIGKCVEADLKAIYERDPACDEYSLPLLYFKGFHAIQAHRINHRLYLDGRKTLAYFLQNRMSEVFGVDIHPAARFGYGLMLDHATGFVAGETAVLGNNISILHGVTLGGSGKEGGDRHPKIGDGVMIGANASILGNIRIGSNAKIGAGSVVVSDVPPSITVVGVPAKPVARSLKTPSADMDQNIQFTEIDFMI

SEQ ID NO: 1138 - protein, 192 aa, Neisseria
MSEQTQQQNSEEAVENVEAVETVETVGNADGVQEQAAAEPAYEDLQARIAELEAQLKDEQLRALANEQNLRRRHQQEIADTHKFAGQKFAVEMLPVKDYLEMALLDQSGNFDALKMGVQMTLNELQKAFDATQIKEINPKAGDKLDPNIHQAMQAVASEQEPNTVVGVMKKGYTLSDRVLRPAMVTVAQKEA

SEQ ID NO: 1139 - protein, 71 aa, Neisseria
MKTLLLTFGIFLTVIIGMAVGYIFSKRSIKGSCGGITALGMKKMCDCDTPCDTLQKKLDEEKQAGGIRVDR

SEQ ID NO: 1140 - protein, 351 aa, Neisseria; identical to SEQ ID NO: 223

SEQ ID NO: 1141 - protein, 405 aa, Neisseria
MEIILGIVMFTVIVLVLALMILFAKSKLVSEGDITIKVNGEKELTMPAGGKLLGALANEGIFIPSACGGGGSCGQCRVVVKSGGGDILPTELSHISKREAREGCRLSCQVNVKTDMDIEVPEEVFGVKKWECTVISNDNKATFIKELKLAIPEGEEVPFRAGGYIQIEAPPHTVAYKDFDIPKEYHEDWDKYNLWQYVSKVDEPILRAYSMASYPEEKGIIMLNVRIATPPPRVPDAPPGQMSSYIWSLKPGDKVTISGPFGEFFAKDTDAEMVFIGGGAGMAPMRSHIFDQLKRLNSKRKITFWYGARSKREMFYVEDFDQLAAEFPNFTWHVALSDPLPEDNWDGYTGFIHNVVYENHLKNHEAPEDCEFYMCGPPIMNQSVIKMLKDLGVEDENILLDDFGG

SEQ ID NO: 1142 - protein, 197 aa, Neisseria
MEHYLSLFIKSVFIENMALSFFLGMCTFLAVSKKVSTAFGLGVAVIFVLGLSVPVNQLVYSLLKDGAIAEGVDLTFLKFITFIGVIAALVQILEMFLDKFVPALYNALGIYLPLITVNCAIFGAVSFMAQREYNFGESVVYGFGAGLGWMLAIVALAGITEKMKYSDAPKGLKGLGITFIAAGLMAMAFMSFSGIQL

SEQ ID NO: 1143 - protein, 208 aa, Neisseria
MADMKRLKHLMFSPFIDNNPIALQVLGICSALAVTTKLQTAIVMGISVALVTGFSSFFISLVRNYIPNSIRIIVQMAIIASLVTLVDQLLQAFAYELSKQLSVFVGLIITNCIVMGRAEAFAMKEPPLESLIDGIGNGAGYGIMLLVVATVRELIGSGKLLGYTVFQTVQDGGWYQTNGLFLLAPSAFFIIGFLIWGLRTWKPEQAEE

SEQ ID NO: 1144 - protein, 258 aa, Neisseria
MAKKFDKDSFSGTLIVVLAVSLICSVIVAGAVVGLKPIQEKQKLQDKQGYILSVAGLMDKDTDIGKTFAERIEQRVVDLATGEYVADAPKDFSARIAGKDPAQSIRIKTEDDLAGIKSRAKYTEVYLVKGEDGKIGQIILPMHGNGLWSVMYGFVAIQPDGNTINGITYYEQGETPGLGGEIGNPLWQQKFVGKKLFDGQGKLALHVGKGAGSDKEHGVDALSGASLTSKGVQGSFAYWFGENGYIPYLNKLKSAGAQ

SEQ ID NO: 1145 - protein, 410 aa, Neisseria
MGLKHFLEKIEPHFLPGGKHEKWYALYEAAATIFYTSGAVTRKAAHVRDALDSKRMMILVWLALFPAMFYGMYNVGAQAFGALTPDLLQQNIANDWHYAFANALGINMSSEAGVSDKMLFGAIYFLPIYATVFVVGGFWEVLFATVRKHEINEGFFVTSILFALIVPPTLPLWQAALGISFGVVVAKEVFGGTGKNFMNPALAGRAFLFFAYPANLSGDAVWTAVDGYSGATALAQWAAHGADGLKNAVTGQTITWMDAFIGKLPGSIGEVSTLALLIGGAFIVFARIASWRIIAGVMIGMIAMSSLFNFIGSDTNAMFAMPWYWHLVVGGFAIGMLFMATDPVSASFTNVGKWWYGALIGVMCVLIRVVNPAYPEGMMLAILFANLFAPIFDYFVAQANIKRRKARSNG

SEQ ID NO: 1146 - protein, 447 aa, Neisseria; identical to SEQ ID NO: 63

SEQ ID NO: 1147 - protein, 473 aa, Neisseria
MRHLPLFSLMLFPASVYAADLDGANLNLLWGLPFALILLSIALGPLFFSHTWHHHYGKITAFWTLLFLIPFSLVFGASAGIHTVAHALVEEYIPFILLLLALYTISGGILVWGDLNGTPKLNTALLAVGTALASIMGTTGAAMLMIRPLLKANQNRTRRVHIVIFFIFLVANIGGGLTPLGDPPLFLGFLKGVDFMWTVKHMFAPVLISTAVLLTAFYFIDNRFFKQESIAQDTPAQQEKPEKIAIFGKWNFLLLSGVVGAVLMSGLWKPEHPGFEILGSRYALQNLVRDVILIALTAVSMAITPKQVRAGNEFNFEPIAEVGKLFLGIFITIFPVLSILKAGEAGALGGVVSLVHDTAGHPINVMYFWMSGILSAFLDNAPTYLVFFNMAGGDAQALMTGTLFHSLLAVSMGSVFMGALTYIGNAPNFMVKAIAEQRGVPMPTFFGYMMWSVAFLTPVFIVHTLIFFVFKLL

SEQ ID NO: 1148 - protein, 119 aa, Neisseria
MIRYLLIACGCISLLLGIIGIFLPLLPTTPFVLLSAACWAKASPRFYRWLHRHRYFGPMVHNWEQNGAVPRKAKIFAISMMTASCLIMFWQFPQRWWVGAVSSVFCSLVAIWMWRRPES

SEQ ID NO: 1149 - protein, 201 aa, Neisseria
MTIMNINTSENKDAVAEHTGQWLEKAVIGLNLCPFAKAPHVKNLVRIAISEAKHLDGFLEDLDEELQRLGNTPATELETTLLVHPTLFPDFDVFNDMLDIADAAVVENGLEGIVQIAPFHPDFQFEGTDSDDIGNYTNRSPYPTLHLIREDSIAKAAQAFPDASAIFERNIALLEKMGHEGWAKLGITSCPYPHNKKNISK

SEQ ID NO: 1150 - protein, 187 aa, Neisseria
MLIWSPSVRIAANIRTDNPNSLKRNANMPQLTLDKTDIKILQVLQENGRLTNVELSERVALSPSPCLRRLKQLEDAGIVRQYAALLSPESVNLGLQAFIRVSIRKAKDAREDFAASVRKWPEVLSCFALTGETDYLLQAFFTDMNAFSHFVLDTLLSHHGVQDAQSSFVLKEIKHTTSLPLNHLLKE

SEQ ID NO: 1151 - protein, 366 aa, Neisseria
MTALKTTPFHQAHQDAGAKLVDFAGWELPIHYGSQIAEHEAVRTDAGMFDVSHMLVTDVAGANAKAFFRKLIANDVAKLAFVGKALYSALLNDNGGVIDDLIVYRTNEAETQYRIVSNGATREKDTAQFHKVGQEFGVAFNPRYDLGMLAVQGPKAIEKLLTVKPEWADVVHNLKPFQGADLGNDWFVARTGYTGEDGVEVILPGTEAVAFFKALQQAGVQPCGLGARDTLRMEAGMNLYGNDMDDDTSPLEAGMGWTVDLKDESRDFVGKAALLALKEKGVAVKQVGLLLEKGGILRAHMEVLTDKGQGETTSGVFSPSLKQSIAIARVPKDFDGDTAKVLMRGKEVDVRVLKLPFVRNGQKQFD

SEQ ID NO: 1152 - protein, 128 aa, Neisseria
MSNNIPAELKYVASHEWLRLEEDGTITVGITHHAQELLGDIVFVELPEVGANLAAEEQAGVVESVKAASDVYAPIAGEVVAVNEDLPSAPETANSDPYGAGWFFKLKPANVADYDSLLTAEQYAGEVD

SEQ ID NO: 1153 - protein, 415 aa, Neisseria
MQLTAVGLNHQTAPLSIREKLAFAAAALPKAVRNLARSNAATEAVILSTCNRTELYCVGDSEEIIRWLADYHSLPIEEIRPYLYALDMQETVRHAFRVACGLDSMVLGEPQILGQIKDAVRVAQEQESMGKKLNALFQKTFSVAKEVRTDTAVGENSVSMASASVKLAEQIFPDIGDLNVLFIGAGEMIELVATYFAAKSPRLMTVANRTLARAQELCDKLGVNAEPCLLSDLPAILHDYDVVVSSTASQLPIVGKGMVERALKQRQSMPLFMLDLAVPRDIEAEVGDLNDAYLYTVDDMVNIVQSGKEARQKAAAAAETLVSEKVAEFVRQQQGRQSVPLIKALRDEGEKARKQVLENAMKQLAKGATAEEVLERLSVQLTNKLLHSPTQTLNKAGEEDKDLVHAVAQIYHLDK

SEQ ID NO: 1154 - protein, 190 aa, Neisseria
MIHIISILKSIGISGIVMSCFSIKRMSAFRARITAFFAAFVFLTAALPAYAERLPDFLAKIQPSEIFPGADRYGKPEGKPMVARVYKGDEQLGLVYITTDAVNTRGYSSKPIDTLMVLANDGTIAGAKLVDHHEPIMLIGIPHLPAPGRAIRSNWLPAYIKPNFTLTNRLRLKGLPTVPQPSKATGAGVP

SEQ ID NO: 1155 - protein, 344 aa, Neisseria
MSLPAMDAGIYLEETAPRALIEHNNILDNSVGVYLHGSADAMVRENKIVGDATLRVNERGNGVTVWNAPGAQVVGNDISKGRDGIFSNTSTHNTYKNNRFSDLRFAVHYMYTNDSEISGNISVGNNMGYVLMFSERLKVFDNIAVGSRDQGIMLNYVNYSDIHDNIINKAGKCVFAYNANYDKLFANHFENCQIGIHFTAAIEGTSLHDNSFINNESQVKYVSTRFLDWSEGGHGNYWSDNSAFDLNGDGFGDSAYRPNGIIDQIIWRAPVSRLLMNSPAISIVKWAQAQFPAVLPGGVVDSKPLMKPYAPKIQTRYQAMKDELLKEVETRQSEWGRAENGSLN

SEQ ID NO: 1156 - protein, 206 aa, Neisseria
MTTHHVELRKVTKRFGAQKAVNQVDLVLKAGESVGLAGHNGAGKSTIMKLILGLITPTEGEVMLLGERTGSKAGARLRSQIGYLPETVALHPSLIGIETLDFYAKLKKQPLTQNRGLLERVGISQAAHRRVGTYSKGMRQRLALAQALLGEPKVLLFDEPTTGLDPASRQMFYEVVRELNGRGATVLLSTHALAELDGHADRIIVD

SEQ ID NO: 1157 - protein, 164 aa, Neisseria
MKKTLLAIVAVSALSACRQAEEGPPPLPRQISDRSVGHYCSMNLTEHNGPKAQIFLNGKPDQPVWFSTIKQMFGYTKLPEEPKGIRVIYVTDMGNVTDWTNPNADTEWMDAKKAFYVIDSGFIGGMGAEDALPFGNKEQAEKFAKDKGGKVVGFDDMPDTYIFK

SEQ ID NO: 1158 - protein, 553 aa, Neisseria
MTESITRDSMQYDVVIVGAGPSGLSAAIKLKQLAEQNGREISVCVVEKGSEVGAHSLAGAVIDPIALNELISDWKEKGAPLTRTVTQDKVLFLTEKKAFNLPITPNFDNHGNYIVSLGEVVRWLAEQAENMGVEIYPGFAAAEVLYHEDGSVKGIATGNMGIGKDGEPTDSFQPGMELWAQQTLFAEGCRGSLSKQIIERFQLDQNSQPQTYGLGIKEVWEVPSEQHQPGLVVHSAGWPLDSKTYGGAFVYHFDDNKVAVGFVVGLDYQNPYLSPFEEFQRFKTHPEIRKTFEGGRRIAYGARSLIEGGLQSLPKLSFKGGILVGDAAGFLNMPRIKGIHTAMKSAMLAAEAVFPLLENLEEVEGFDSGKEAADYQQRFEQSWLYQELYAARNVRPSFKWGVYLGSIYTGIDQMIFRGKAPWTLKHHGKDNEQLKKAAACKPIDYPKPDGVLTFDRLSSVFLANLAHEENQPDHLVLNNPQTMIDVNYKEYASPETRYCPAGVYEIVEENGNPRLQINAANCVHCKTCDIKDPTQNITWICPEGASGPNYGGM

SEQ ID NO: 1159 - protein, 180 aa, Neisseria
MQSWKERRDFNIVKQDLDFSCGAASVVTLLNNFYGQKLTEEDVLKKLDKEQMPASFEDMRRIMPDLGFEAKGYALSFEQLAQLQIPVIVYLKYRKDDHFSVLRGIDGNTVLLADPSLGHVSMSRAQFLDAWQTREGNLAGKILAVVPKGRDAGGDKAFFTRSPKRQTEFAVGQVKWWRAY

SEQ ID NO: 1160 - protein, 222 aa, Neisseria
MLPSKYEDNALQIKEKSTERTAPFFVLEVTARSAADILGIHPNSAALFYRKIRTVINHHLALAADEVFEGPVEPDESDFGGRRKGRRGRGAAGKVVVFGILKRNGRVYTVVVDNAKSETLLPVIKKKIMPDSIVYTDSLSSYDKLDVSGFIHYRINHSKECADRQNHINGIENFWNQAKRVLRKYNGIDRKSFPLFLKECEFRFNFGTPSQQLKILRDWCGI

SEQ ID NO: 1161 - protein, 271 aa, Neisseria
MRPYATTIYQLFILFIGSVFTMTSCEPVNEKTDQKAVSAQQAKEQTSFNNPEPMTGFEHTVTFDFQGTKMVIPYGYLARYTQDNATKWLSDTPGQDAYSINLIEISVYYKKTDQGWVLEPYNQQNKAHFIQFLRDGLDSVDDIVIRKDACSLSTTMGERLLTYGVKKMPSAYPEYEAYEDKRHIPENPYFHEFYYIKKGENPAIITHWNNRVNQAEEDNYSTSVGSCINGFTVQYYPFIREKQQLTQQELVGYHQQVEQLVQSFVNNSSKK

SEQ ID NO: 1162 - protein, 1302 aa, Neisseria
MNEGEVVLTPEQIQTLRGYASRGDTYGGWRYLANLGDRYADDAAAIVGKDANLNGLNLWMKKGVENLWDDTVGKKTRLEKFDRVALQHFSQYVDLINENNGRLPNTSEIERSYYKAVTENGVSSSAAIDLVINRSLPDMADGYWALGLGIEAERIHNEQAVNNPNGSERDNRKQLISALDKGFDGSFKEKHFTFLQSVIMDVTKLGVEYTIDGWQKIGGWGNGIINDLYKSVVKREWTGIFEIVNNNIKQFRDLFPNPEGWIDDGHQCFAPWVKETKKRNGKYHVYDPLALDLDGDGIETVAAKGFSGSLFDHTNNGIRTATGWVSADDGLLVRDLNGNGIIDNGAELFGDNTKLADGSFAKHGYAALAELDSNGDNIINAADAAFQSLRVWQDLNQDGISQANELRTLEELGIQSLDLAYKDVNKNLGNGNTLAQQGSYTKTDGTTAKMGDLLLAADNLHSRFKDKVELTAEQAKAANLAGIGRLRDLREAAALSGDLANMLKAYSAAETKEAQLALLDNLIHKWAETDSNWGKKSPMRLSTDWTQTANEGIALTPSQVAQLKKNALVSLSDKAKAAIDAARDRIAVLDAYTGQDSNTLYYMSEEDALNIVKVTNDTYDHLAKNIYQNLLFQTRLQPYLNQISFKMENDTFTLDFSGLVQAFNHVKETNPQKAFVDLAEMLAYGELRSWYEGRRLMTDYVEEAKKAGKFEDYQKVLGQETVALLAKTSGTQADDILQNVGFGHNKNVSLYGNDGNDTLIGGAGNDYLEGGSGSDTYVFGEGFGQDTVYNYDYATGRKDIIRFTDGITADMLTFTREGNHLLIKAKDGSGQVTVQSYFQNDGSGAYRIDEIHFDNGKVLDVATVKELVQQSTDGSDRLYAYQSGNTLNGGLGDDYLYGADGDDLLNGDAGNDSIYSGNGNDTLDGGEGNDALYGYNGNDALNGGEGNDHLNGEDGNDTLIGGAGNDYLEGGSGSDTYVFGKGFGQDAVYNYDYATGRKDIIRFTDGITADMLTFTREGNHLLIKAKDGSGQVTVQSYFQNDGSGAYRIDEIHFDNGKVLDVATVKELVQQSTDGSDRLYAYQSGNTLNGGLGDDYLYGADGDDLLNGDAGNDSIYSGNGNDTLDGGEGNDALYGYNGNDALNGGEGNDHLNGEDGNDTLIGGAGNDYLEGGSGSDTYVFGEGFGQDTVYNYHVDKNSDTMHFKGFKAADVHFIRSGSDLVLSASEQDNVRISGFFYGENHRVDTFVFDDAAISNPDFAKYINAGNNLVQSMSVFGSNTAATGGNVDANIQSVQQPLLVTPSA

SEQ ID NO: 1163 - protein, 304 aa, Neisseria
MKHLKLTLIAALLTASATAAPLPVVTSFSILGDVAKQIGGERVSIQSLVGANQDTHAYHMTSGDIKKIRSAKLVLLNGLGLEAADVQRAVKQSKVSYTEATKGIQPLKAEEEGGHHHDHDHDHEGHHHDHGEYDPHVWNDPVLMSAYAQNVAKALIKADPEGKVYYQQRLGNYQMQLKKLHSDAQAAFNAVPAAKRKVLTGHDAFSYMGKRYHIEFIAPQGVSSEAEPSAKQVAAIIRQIKREGIKAVFTENIKDTRMVDRIAKETGVNVSGKLYSDALGNAPADTYIGMYRHNIKALTNAMKQ

SEQ ID NO: 1164 - protein, 291 aa, Neisseria
MNLYDLLLAPFAEFDFMRYALASVFCLSLSAAPVGVFLVMRRMSLIGDALSHAVLPGAAVGYMFAGLSLPAMGLGGVAAGMLMALLAGLVSRFTTLKEDANFAAFYLSSLAIGVVLVSKNGSSVDLLHLLFGSVLAVDIPALQLIAAVSSLTLITLAVIYRPLVLESIDPLFLKSVGGKGGLWHVLFLVLVVMNLVSGFQALGTLMSVGLMMLPAITARLWAKHMGALILLSVLTALLCGLSGLLISYHIEIPSGPAIILCCSVLYLFSVILGKEGGILTKWLKNHRHHTT

SEQ ID NO: 1165 - protein, 251 aa, Neisseria
MGRLLLGSIRMSIIVENLTVSYRRRPAVHHVDITFEEHSMWAVFGPNGAGKSTFLKSLMGLQPIDTGSIRLDGLTRQNIAYLPQQSDIDRSQPMTVFDLAAMGLWYEIGFFKGINTAQKQRVHEALERVGMQRFADRQIAYLSNGQFQRVLFARMLVQNAKFLLLDEPFNAVDARTTYELLDVLQKCHCGGHAIIAVLHDYEQVRAYFPNTLLLAREKIAAGATETILTEPYLAQANAKMQQQESPDWCAS

SEQ ID NO: 1166 - protein, 121 aa, Neisseria
MNLIQQLEQEEIARLNKEIPEFAPGDTVVVSVRVVEGTRSRLQAYEGVVIARRNRGLNSNFIVRKISSGEGVERTFQLYSPTVEKIEVKRRGDVRRAKLYYLRGLTGKAARIKEKLPARKG

SEQ ID NO: 1167 - protein, 249 aa, Neisseria
MLIQAVTIFPEMFDSITRYGVTGRANRQGIWQFEAVNPRKFADNRLGYIDDRPFGGGPGMIMMAPPLHAAIEHAKTQSSQAAKVIYLSPQGKPLTHQKAVELAELPHLILLCGRYEGIDERLLQSSVDEEISIGDFVVSGGELPAMMLMDAVLRLVPGVLGDMQSAEQDSFSSGILDCPHYTKPLEFQGMAVPEVLRSGNHGLIAEWRLEQSLRRTLERRPDLLEKRVLIPKESRLLETIRQEQREIQS

SEQ ID NO: 1168 - protein, 169 aa, Neisseria
MTDTQNRVAMGYIKGVFGIKGWLKIAANTEYSDSLLDYPEWHLVKDGKTISVTLEAGKVVNGELQVKFEGINDRDLAFSLRGYTIEIPREAFAPTEEDEYYWTDLVGMTVVNKDHTVLGKVSNLMETGANDVLMIDGEHGQILIPFVSQYIETVDTGSKTITADWGLDY

SEQ ID NO: 1169 - protein, 81 aa, Neisseria
MVVIRLARGGSKHRPFYNVIVTDSRSRRDGRFIERVGFYNPVANEKQERVRLNADRLNHWIAQGAQVSDSVAKLIKEQKAA

SEQ ID NO: 1170 - protein, 808 aa, Neisseria
MSAQTDPGYFFMPNHIILIGASEQPYSLGERVLSNLLSTPFQGKITPVNPRHHTIAGLPAYTSLNKIPGNADLIIAVTLPDSYDTLFKTCRKKQLRHIILIQDWDNLSAAELHTAETAIRKHHGNGLNITACTTAGIQLPSLGLNISTQDGYAAGHTAILTGNAAVSRQIDNILNKLRQGTSRHISLHPGISPITSADWLNRFGHSLHTKTAVLHHNPEEDQRKLFSAIRQFTRHTPLILHITCRTTETDRAVLHCLARHCNFLVSFNADDLEAALRAQLSDLPPLSRLDILSDTPAEWLHAHAPKNLTLHFPNLPHHIRNGHLTGTPTPSICHDIASRQLAHPDTQAVLTILSPSGHEDYKKTARALIRLSEQTAKPLLVSSPFSDGITHFDTPTQAIRTLSYRNTAAALKQAQLDIAPPQPCRLKTPQPQNIKKALAAANPSLLAEALHLPPYRHTTHNAVQFQFDSHPLYGDILTARCNGQTTAVLPPFTTLDSRHLARFAELDGTQTLDQFLHTLTVIPEYRQHILGITLNLNGGQYSSDFLLKTPETHDTPKRKNTGKAAQTLEHAAAKMQSAAAYLKHKNPTAAEFLRHTSEAAAELLGSKTETGAAVPNVLAPYPAAYPKTLSLRNNTTVTITPILPEDAEAKQQFVRSLGPEARYTRFMTHTNELPAATLARLCNPDYHCEAAWTAKDADSNIVAVVRHSRLNRNECEFGITLAEHMRGSGLAQKMMELIIQTAAQQGYRTMSADILKTNTPMIKLAEKSGFTLKESDTEKNLYRAYLNLAADKTTEKTNKNLRTDHKIT

SEQ ID NO: 1171 - protein, 468 aa, Neisseria
MKLFQRIFATFCAVIVCAIFVASFSFWLVQNTLAENQFNQRRTIETTLMGSIISAFRARGDAGAREILTEWKDSPVSSGVYVIQGDEKKDILNRYIDSYTIERARLFAAGHPHSNLVHIEYDRFGEEYLFFTKDWDKLQARRLPSPLLIPGLPLAPIWHELIILSFIIIVGLLMAYILAGNIAKPIRILGNGMDRVANGELETRISQQVDDRDDELSHLAIQFDKMVEKLEKLVAKERHLLHHVSHEMRSPLARMQAIVGLIQAQPQKQEQYLKRLEGELTRMDTLAGELLTLSRLETSNMALEKESLKLLPFLGNLVEDNQSIAQKNGQTVTLSADGKIPENTTILANESYLYRAFDNVIRNAVNYSPEGSTILINIGQDHKHWIIDVTDNGPGVDEMQLPHIFTAFYRADSSANKPGTGLGLALTQHIIEQHCGKIIAENIKPNGLRMRFILPKKKTGSKTEKSAN

SEQ ID NO: 1172 - protein, 225 aa, Neisseria
MSRVLLVDDDALLTELLTEYLSAEGLNVRSVPDGEAGVQEILSGQYDVVVLDSMMPKMNGLDVLKNVRARSTVPIIMLTAKGDDIDRIIGLEMGADDYVPKPCTPRELLARINAILRRAQHSGEQNNAPNSISVSDVVLYPAKRQASVKDMPLELTSTEFNLLEVLMRHAGQVVSKETLSVEALDRKLAKFDRSIDVHISSIRHKLGDASLIQTVRGLGYLFVKN

SEQ ID NO: 1173 - protein, 604 aa, Neisseria
MPAETTVSGAHPAAKLPIYILPCFLWIGIVPFTFALKLKPSPDFYHDAAAAAGLIVLLFLTAGKKLFDVKIPAISFLLFAMAAFWYLQARLMNLIYPGMNDIVSWIFILLAVSAWACRSLVAHFGQERIVTLFAWSLLIGSLLQSCIVVIQFAGWEDTPLFQNIIVYSGQGVIGHIGQRNNLGHYLMWGILAAAYLNGQRKIPAALGVICLIMQTAVLGLVNSRTILTYIAAIALILPFWYFRSDKSNRRTMLGIAAAVFLTALFQFSMNTILETFTGIRYETAVERVANGGFTDLPRQIEWNKALAAFQSAPIFGHGWNSFAQQTFLINAEQHNIYDNLLSNLFTHSHNIVLQLLAEMGISGTLLVAATLLTGIAGLLKRPLTPASLFLICTLAVSMCHSMLEYPLWYVYFLIPFGLMLFLSPAEASDGIAFKKAANLGILTASAAIFAGLLHLDWTYTRLVNAFSPATDDSAKTLNRKINELRYISANSPMLSFYADFSLVNFALPEYPETQTWAEEATLKSLKYRPHSATYRIALYLMRQGKVAEAKQWMRATQSYYPYLMPRYADEIRKLPVWAPLLPELLKDCKAFAAAPGHPEAKPCK

SEQ ID NO: 1174 - protein, 117 aa, Neisseria
MNRQTAYLLASFSLIALIILSLSWELWIAPLRPGGSWLALKALPLCLPLSGILKKKIYTYQYSSMLVLIYFAEAVMRLFDAYPAEQICAALSAVFSIIFFISCLSFVKQYKETNNAR

SEQ ID NO: 1175 - protein, 202 aa, Neisseria
MNTLYLGSNSPRRMEILTQLGYRVIQLPAGIDESVKAGETPFAYVQRMAEEKNRTALTLFCETNGTMPDFPLITADTCVVSDGIILGKPRSQAEAIEFLNRLSGKQHTVLTAVCIHYRGKTSSRVQTNRVVFKPLSSEEISAYVQSGEPMDKAGAYAVQGIGGIFIQSIEGSFSGIMGLPVYETVSMLQDLGYRSPLSALKP

SEQ ID NO: 1176 - protein, 256 aa, Neisseria
MSETQNEQPVQPLVEHLIELRRRLMWTVVGILVCFFGLMPFAQQLYTFIADPLMANLPKDTSMIATDVIAPFFVPVKVTLMAAFLISLPHTLYQIWAFVAPALYQNEKRLITPLVLSSVSLFFIGMAFAYFLVFPVIFKFLASVTPVGVNMATDIDKYLSFILGMFVAFGTTFEVPIVVILLTKIGVVTTGQLKRARPYVIVGAFVIAAIITPPDVISQTLLAIPLILLYEAGIWFGRFFTPRSEQDGDIRPPATT

SEQ ID NO: 1177 - protein, 228 aa, Neisseria; identical to SEQ ID NO: 35

SEQ ID NO: 1178 - protein, 67 aa, Neisseria
MGSFSLTHWIIVLIIVVLIFGTKKLRNVGKDLGGAVHDFKQGLNEGTDGKEAQKDDVIEHKKDEDKA

SEQ ID NO: 1179 - protein, 107 aa, Neisseria
MDNCIFCKIAAKDIPAQTVYEDGEMVCFKDINPAAPVHLLLIPKVHFDSLAHAAPEHQMLLGKMMLKVPEIAKAAGLADGFKTLINTGKGGGQEVFHLHIHIMGTPV

SEQ ID NO: 1180 - protein, 107 aa, Neisseria
MGDSVLSAIQQTITQRKSANPSESYVAQLLHKGEDKILKKVIEEAGEVLMASKDKNPSHLVYEVADLWFHTMILLTHHDLKAEDVLDELARRQGLSGLVEKAARTES

SEQ ID NO: 1181 - protein, 354 aa, Neisseria
MKAARFYDKGDIRIEDIPEPTVAPGTVGINVAWCGICGTDLHEFMEGPIFIPPCGHPHPISGESAPVTMGHEFSGVVYAVGEGVDDIKVGQHVVVEPYIIRDDVPTGEGSNYHLSKDMNFIGLGGCGGGLSEKIAVKRRWVHPISDKIPLDQAALIEPLSVGHHAYVRSGAKEGDVALVGGAGPIGLLLAAVLKAKGIKVIITELSKARKDKARESGVADYILDPSEVDVVAEVKKLTNGEGVDVAFECTSVNKVLDTLVEACKPAANLVIVSIWSHPATINVHSVVMKELDVRGTIAYCNDHAETIKLVEEGKINLEPFITQRIKLDELVSKGFERLIHNNESAVKIIVSPNL

SEQ ID NO: 1182 - protein, 369 aa, Neisseria
MSLTRLILKFYALLRLFLGKNARTAWISHPACAGHEPGANHPDSPDRILCIEQALRRAGIWQHLQTIEAEEISDTRLALVHSSKYLNRLESCLPQKGKISRLDNDTAISTGSLSAARFAAGSAVQAVDMVMNRKAWHAFCAARPPGHHAGSGKAGGFCLLNNVAAGVMHAIAEYRLKRIAVIDFDVHYGDGTAEIFKDDPRILFFNLFETDLFPFPENNDMPDGGNMVHLPLPPGTGSRTFREAVRRQWLPRLAAFKPELVLLSAGFDAHRLDESGRLNLHEADFAWLTHKIIQTASGCPGKIISVLEGGYTLEPLAQSAAEHIRVLAGLGKSDAATAYQKTLDPTKKRFAKPKTGQVRQPTQSDRYDI

SEQ ID NO: 1183 - protein, 88 aa, Neisseria
MNQAVAQFAPLVLIMVVFYFLIMRPQQKKFKAHQAMLAALKVGDKVVLAAGFKGKVTRVGEQFFTVDIGQGTKIEVEVERNAIAAKVD

SEQ ID NO: 1184 - protein, 618 aa, Neisseria
MMNRYPLWKYLLIVFTIAVAAVYSLPNLFGETPAVQVSTNRQAIIINEQTQFKVDAALKNAGIQTDGMFVVDNSLKVRFKDTETQLKARDVIENTLGEGYITALNLLADSPEWMAKIKANPMFLGLDLRGGVHFTMQVDMKAAMQKTFERYSGDIRRELRREKIRSGTVRQAGNSLTVPLQDAGDVQKALPQLRKLFPEATLNSDGSNIVLTLSEEAVNKVCSDAVKQNITTLHNRVNELGVAEPVIQQSGADRIVVQLPGVQDTAKAKDIIGRTATLELRMVEDDPAKLREALEGNVPSGYELLSSGGDRPEILLISKQVELTGDNINDAQPSFDQMGAPAVSLSLDSAGGSIFGELTAANVGKRMAMVLIDQGKSEVVTAPVIRTAITGGRVEISGSMTTAEANDTSLLLRAGSLAAPMQIVEERTIGPSLGKENIEKGFHSTLWGFAIVAAFMVVYYRLMGFFSTIALSANILFLIGILSAMQATLTLPGMAALALTLGMAIDSNVLINERIREELRAGVPPQQAINLGFQHAWATIVDSNLTSLIAGIALLVFGSGPVRGFAVVHCLGILTSMYSSVVVFRALVNLWYGRRRKLQNISIGSVWKPKAEMAGGKE

SEQ ID NO: 1185 - protein, 311 aa, Neisseria
MELFKIKRDIPFMSYGKLTTFISLVTFIAAVFFLVTRGLNFSVEFTGGTVMEVQYQQGADVNKMRERLDTLKIGDVQVQALGTNKHIMIRLPNKEGVTSAQLSNQVMDLLKKDSPDVTLRQVEFIGPQVGEELVSNGLMALGFVVIGIIIYLSMRFEWRFAVSAIIANMHDIVIILGCFAFFQWEFSLTVLAGILAVLGYSVNESVVVFDRIRENFRKPAMRGHAVPEVIDNAITATMSRTIITHGSTEAMVVSMLVFGGAALHGFSMALTIGIVFGIYSSVLVASPLLLMFGLSRDNIGKEPKKKEEIVV

SEQ ID NO: 1186 - protein, 89 aa, Neisseria
MALTVEQKAQIVKDFQRKEGDTGSSEVQVALLTFRINDLTPHFKANPKDHHSRRGLLKMVSQRRRLLAYLRRTQPDTYRALITRLGLRK

SEQ ID NO: 1187 - protein, 419 aa, Neisseria
MLPVRFTRVSDGIKRLTPASNQTAFYHPFENPFCRYSSFYWSIAIMTATTASSAKPYLKIQGLVKKFGDNYAVDNIDLDIYQHEIFALLGSSGSGKSTLLRMLAGMESPNQGKIILDGQDITKLAPYDRPINMMFQSYALFPHMTVEQNIAFGLKQDKMPKGEIAARVEEMLRLVQMTKFAKRKPHQLSGGQQQRIALARSLAKRPKILLLDEPLGALDKKLRQQTQLELVNTLEQVGVTCIMVTHDQEEAMTMATRIAIMSDGQLQQVGTPSDVYDYPNSRFTAEFIGETNIFDGVVIEDHADYAVIECEGLENHVRIDHGLGGPSEQDLWVSIRPEDIDLYKEKPEYLGDYNWAKGTVKEIAYLGSFAIYHIKLGNGRVVKSQVPAPYWYVRNITPPTWDETVYISWPENQPTPLFR

SEQ ID NO: 1188 - protein, 321 aa, Neisseria
MNLNKLKNKLFRRPGQRAVIAVPYIWLLVLFLIPFAIVLKISFAEQEIAIPPFTPLTTIDEDLGRLNIAVSYQNYADIFQNFWSTLNPFGDGENSNIYLMTYWSSIKTALTTTVICLLVGYPTAYAISRANPSVRNGLLLAIMLPFWTSFLLRVYAWMGLLGHNGIVNNLLIKMGIISEPLDLFYNAFSLNLVMVYAYLPFMILPLYTQLVKLDNRLLEAASDLGAGPVKSFLTITLPLSKTGIIAGSMLVFVPAVGEFVIPELVGGSENLMIGKVLWQAFFDQNNWPLASAVAVVMVALLVVPIALFQHYENRELEEGAK

SEQ ID NO: 1189 - protein, 295 aa, Neisseria
MQKSKLSWFLKLMLALSLAFLYIPLVVLVIYSFNESKLVTVWGGFSTKWYGALLENDTILEAAWLSLRIAVVSSLAAVVLGTLAGYAMARIKRFRGSTLFAGMISAPMVMPDVITGLSMLLLIIQVQIFLQGSEWLQHLYFDRGFFTIFLGHTTLCMAYITVVIRSRLVELDQSLEEAAMDLGARPLKIFFVITLPLIAPAIASGFLLGITLSLDDLVITSFLSGPGSSTLPQVIFSKIKLGLDPQMNVLATILIGIIGTLVIIVNYWMMRQATKRDREAAEAYRQEKLAAEKAN

SEQ ID NO: 1190 - protein, 35 aa, Neisseria
MTGSACFLQPIFCLDDMARQPVSFRPKIHLIKQTQ

SEQ ID NO: 1191 - protein, 431 aa, Neisseria
MIRPDFQEYLPSYYFSSVNPHTVYPKLQCRLKTDTCIIGGGLGGLCTALPLAEQGHETVVLEAARIGFGASGRSGGQVISDYACGMGEIEKQVGLEQAQWFWQQSLQAVELVDERVRKHAVDCDWQRGYATVAVRPQHWEELQQWHEHAQRHYGASHYQLWDKAELKQQLDSDMYQGAQFDPLSGHLHPLTYTLGIARAAAEAGAQIFEQSPMTCIEPHQNGWLVYTPEGSVECKNVVYAVNTYAGLNPIFRPLERKAIAVSTFIIATEPLGARAKGLIRNNMAVCDNRHILDYYRLSADGRLLFGGKDNEFIDNPERMTELVRQDMLKVFPQLADVKIEYSWGGECDITANLVPHFGRLAPNVFYAQGYSGHGMAITGIAGLAVAEAILGDECRLKPFERLRQPNIILQPFLRKLGSFLGSKYYQWKDSR

SEQ ID NO: 1192 - protein, 434 aa, Neisseria
MKKHIWAASLLPASLSAEPLNWWKPYSAVNSGDTAWVMTAAALVLLMTLPGLALFYGGMVRKKNLLSTMMHSFSIATLVGILWVAVGYSLAFTPGNAFIGGLGRVFLSGMQIDATAQMLTVSPNAPTVPEPVFMFFQMTFAIISTAIITGAFAERMKYSAMMLFSGIWFLLVYVPGAHWVWGGGFMSKGGVLDYAGGTVVHINAGIAGLVAALVLGRRIGYGREAMPPHNMAMTLIGAAMLWFGWFGFNAGSALAADAAAGMAMAVTQVSAVFGAAGWLACEKIAGHKPSALGLASGAVSGLVGITPAAGFTGPSGAAAIGILTAAACFVSVTVVKHKLRYDDSLDAFGIHGFGGLVGGILTGIFFDNRIFGGDAAVWQQLWIQVKDGVVMAAYSGLMSWAILKVVGKICGGLRVGKDVEREGLDLNIHGERVE

SEQ ID NO: 1193 - protein, 134 aa, Neisseria
MRKIRLSRYKQNKLIELFVAGVTARTAAELVGVNKSTSAYYFHRLRLLIYQNSPHLEMFDGEVEADESYFAERQNHINGIGNFWNRAKRHLRKFDGIPKAHFELYLKGYERRFNNSEIKVQISILKQLVKSSLS

SEQ ID NO: 1194 - protein, 419 aa, Neisseria
MHVSELQTLHISKLLELAEEHGIENANRFRKQDLVFAIVRQMMKKGEGFTCSGTLEILPDGFGFLRSADTSYLAGPDDIYVSPTQIRRFNLHTGDTIEGSVRVPKDNERYFALVRLDTINGDHPEVCRHKILFENLTPLFPTEQLKLERDLKSEENLTGRAIDLISPIGKGQRALLVAPPKSGKTVMLQNIAHAVTANYPEVELIVLLIDERPEEVTEMSRSVRGEVVSSTFDEPAQRHVQVAEMVLEKAKRMVEHKKDVVILLDSITRLARAYNTVVPTSGKILTGGVDANALHRPKRFFGAARNVEEGGSLTIIATALVETGSRMDDVIYEEFKGTGNMELHLDRRMAEKRLFPAININKSGTRREELLVPNDQLQRMWLLRKFLHPMDEIEAAEFLIGKIKASKNNDDFFELMRGK

SEQ ID NO: 1195 - protein, 794 aa, Neisseria
MADNYVIWFENLRMTDVERVGGKNASLGEMISQLTEKGVRVPGGFATTAEAYRAFLAHNGLSERISAALAKLDVEDVAELARVGKEIRQWILDTPFPEQLDAEIEAAWNKMVADAGGADISVAVRSSATAEDLPDASFAGQQETFLNINGLDNVKEAMHHVFASLYNDRAISYRVHKGFEHDIVALSAGVQRMVRSDSGASGVMFTLDTESGYDQVVFVTSSYGLGENVVQGAVNPDEFYVFKPTLKAGKPAILRKTMGSKHIKMIFTDKAEAGKSVTNVDVPEEDRNRFSITDEEITELAHYALTIEKHYGRPMDIEWGRDGLDGKLYILQARPETVKSQEEGNRNLRRFAINGDKTVLCEGRAIGQKVGQGKVRLIKDASEMDSVEAGDVLVTDMTDPDWEPVMKRASAIVTNRGGRTCHAAIIARELGIPAVVGCGNATELLKNGQEVTVSCAEGDTGFIYAGLLDVQITDVALDNMPKAPVKVMMNVGNPELAFSFANLPSEGIGLARMEFIINRQIGIHPKALLEFDKQDDELKAEITRRIAGYASPVDFYVDKIAEGVATLAASVYPRKTIVRMSDFKSNEYANLVGGNVYEPHEENPMLGFRGAARYVADNFKDCFALECKALKRVRDEMGLTNVEIMIPFVRTLGEAEAVVKALKENGLERGKNGLRLIMMCELPSNAVLAEQFLQYFDGFSIGSNDMTQLTLGLDRDSGLVSESFDERNPAVKVMLHLAISACRKQNKYVGICGQGPSDHPDFAKWLVEEGIESVSLNPDTVIETWLYLANELNK

SEQ ID NO: 1196 - protein, 273 aa, Neisseria
MSSPRHVFYISDRTGLTAENIGEALLNQFGNLSFKRHTHPFVDTPEKARAVVEKVNRSRQENGQRPIAFVSVVDDEIRRIIKGADAFQINFFETFLGLLEKELNTEATASGQGHHSIGNTKRYDARMEAVNFSLNHDDGVSDKNLQEADVILMGVSRSGKTPTCLYLALQYGIRAANYPLIPDDLESADLPRMVKPYRDKLFGLTIQPERLQAIRQERRPNSTYAKIDTCRSEVADAQSMFRRHGIPFANTTDKSVEELAVHILQACKLKRRF

SEQ ID NO: 1197 - protein, 220 aa, Neisseria
MIQAVLFDLDGTLADTALDLGGALNTLLARHGLPAKSMDEIRTQASHGAAGLIKLGAGITPDHPDYARWRTEYLDEYDSRYAQDTTLFDGVNELIAELGKRGIKWGIITNKPMRFTDKLVPKLGFIIPPAVVVSGDTCGEPKPSVKPMLYACGQIHADPQHTLYVGDAERDIQAGRNAGMTTVLAEWGYIAPEDDTGSWQADFHIRTPLDLLECLDKIQP

SEQ ID NO: 1198 - protein, 275 aa, Neisseria
MKPDIYALLERALLSGDPDEKGRLTDEAFAAVQNADGAETNAPPADFPRAGRPDKPVLVAPSQLTPRKMNTTEGYAAMLHAIAHIEFNAINLALDAAYRFRTLPFQFVRDWVKVAKEEVYHFRLMRERLRAFGFDYGDFEAHNHLWDMAYKTAYDPLLRMALVPRVLEARGLDVTPGIRAKVAQRGDSETCGVLDIIYRDEVGHVAIGNRWYQHLCRERGLEPVALFRSLIARYDMFIFRGYVNIEAREKAGFSRFELDMLEDFEQGLKQNKHAV

SEQ ID NO: 1199 - protein, 207 aa, Neisseria
MMKPHNLFQFLAVCSLTVAVASAQAGAVDALKQFNNDADGISGSFTQTVQSKKKTQTAHGTFKILRPGLFKWEYTKPYRQTIVGDGQTVWLYDVDLAQVTKSSQDQAIGGSPAAILSNKTALESSYTLKEDGSSNGIDYVLATPKRNNAGYQYIRIGFKGGNLAAMQLKDSFGNQTSISFGGLNTNPQLSRGAFKFTPPKGVDVLSN

SEQ ID NO: 1200 - protein, 379 aa, Neisseria
MKKTLVAAAILSLALTACGGGSDTAAQTPSAKPEAEQSGKLNIYNWSDYVDPETVAAFEKETGIKTRSDYYDSNETLEAKVLTGKSGYDLTAPSIANVGRQIKAGAYQKIDKAQIPHYGNIDKDLLKMMEAVDPGNEYAVPYFWGINTLAINTQQVKKALGTDKLPENEWDLVFKPEYTAKLKSCGISYFDSAIEQIPLALHYLGKDPNSENPEDIKAAVDMMKAVRGDVKRFSSSGYIDDMAAGNLCAAIGYGGDLNIAKTRAEEAANGVEIKVLTPKTGVGVWVDSFMIPRDAQNVANAHRYIDYTLRPEVAAKNGSFVTYAPASRPARELMDEKYTSDASIFPNKELMEKSFIVSPKSAESVKLGVKLWQGLKAGK

SEQ ID NO: 1201 - protein, 176 aa, Neisseria
MNAIRTFQNRTPEIHETCMIDEACVVIGEVSLAEDVSVWPCAVLRGDVNSITVGARSNIQDGSVLHVSHKTAAKPEGSPLVIGEDVTVGHKVMLHGCRIGNRVLVGMGTTVLDDAVIEDEVMIGAGSLVPPRKRLAGGYLYVGSPVRQVRVLTDEEKAFLKYSAAHYVKLSKQYGM

SEQ ID NO: 1202 - protein, 531 aa, Neisseria
MSQEILDQVRRRRTFAIISHPDAGKTTLTEKLLLFSGAIQSAGTVKGKKTGKFATSDWMEIEKQRGISVASSVMQFDYKDHTVNLLDTPGHQDFSEDTYRVLTAVDSALMVIDAAKGVEAQTIKLLNVCRLRDTPIVTFMNKYDREVRDSLELLDEVENILKIRCAPVTWPIGMGKNFKGVYHILNDEIYLFEAGGERLPHEFDIIKGIDNPELEQRFPLEIQQLRDEIELVQAASNEFNLDEFLAGELTPVFFGSAINNFGIQEILNSLIDWAPAPKPRDATVRMVEPDEPKFSGFIFKIQANMDPKHRDRIAFLRVCSGKFERGMKMKHLRINREIAASSVVTFMSHDRELVEEAYAGDIIGIPNHGNIQIGDSFSEGEQLAFTGIPFFAPELFRSVRIKNPLKIKQLQKGLQQLGEEGAVQVFKPMSGADLILGAVGVLQFEVVTSRLANEYGVEAVFDSASIWSARWVSCDDKKKLAEFEKANAGNLAIDAGGNLAYLAPNRVNLGLTQERWPDIVFHETREHSVKL

SEQ ID NO: 1203 - protein, 131 aa, Neisseria
MDKNLLEAVKFDEKGLVCAIAQDAETKRILMVAWMNAEALQKTVETGFAHYYSRSRQKQWMKGEESGHTQKVRALRLDCDGDAIVMLIAQNGGIACHTGRESCFYKVWRGSAWETADAVLKDEKEIYGSTH

SEQ ID NO: 1204 - protein, 255 aa, Neisseria
MALAKRIIPCLDVKDGRVVKGVNFIGLRDAGDPVEAAKRYNGEGADELTFLDITASSDNRDTILHIIEEVAGQVFIPLTVGGGVRTVADIRRLLNAGADKVSINTAAVTRPDLIDEAAGFFGSQAIVAAVDAKAANPENTRWEIFTHGGRNPTGLDAVEWAVEMQKRGAGEILLTGMDRDGTKQGFNLPLTRAVAEAVDIPVIASGGVGNVRHLIEGITEGKADAVLAAGIFHFGEIAIREAKRAMREAGIEVRL

SEQ ID NO: 1205 - protein, 245 aa, Neisseria
MLLIPAIDLKEGRCVRLKQGLMEEATVFSDSPAETALHWFKQGARRLHLVDLNGAFAGVPQNLPAIKDILAAVAKDIPVQLGGGIRDLKTIGQYLDLGLNDVIIGTAAVKNPDFVREACKAFPGRIIVGLDAKDGMAAIDGWATVTGHHVIDLAKRFEDDGVNSIIYTDIGRDGMMSGVNIDATVKLAQTVRIPVISSGGLTGLDDIRALCAAEKHGVAGAITGRAIYEGSIDFAQAQQLADSLD

SEQ ID NO: 1206 - protein, 212 aa, Neisseria
MQTAIIDYGMGNLHSVLKSVRTAGQLAGKNTEIFLSGDPDRVSRADKVIFPGQGAMPDCMAALKRDGLDEAVKDALKNKPFFGICVGAQLLFDHSEEGNTDGLGWFGGKVRRFERDLRDPQGCRLKVPHMGWNTVRQTQNHPLFKDIPQDTRFYFVHSYYFAPENPETILGESDYPSPFACIVGKDNVFATQFHTEKSHDAGLTMLKNFLNW

SEQ ID NO: 1207 - protein, 500 aa, Neisseria
MAKVLIVPVSAGLDASAAAQAFAKALDAQIFQAVDATAETLLAQGKSDDWFDALVGKVAALDAANLVIEGIAPDADKIYLAGKNVELALSLDAAAVFAVRSDNADADELANRVNLAKQFFAAAPGVLEGFVVDGAAASVAEAAAEKTGLTFFGSSDALKDVSVLAGREAKRLSPAQFRYNLIDFARQADKRIVLPEGAEPRTVQAAAICHEKGIARCVLLAKREEVEAVAKERGISLPDSLEIIDPASLVEQYVEPMCELRKSKGLTPEDARKQLQDTVVLGTMMMAQNDVDGLVSGAVHTTANTIRPALQLIKTAPGASLVSSVFFMLLPNQVLVFGDCAVNPNPTAQQLADIAIQSADSAKAFGIDPKVAMISYSTVNSGSGPDVDTVIEATKLAREKRPDLAIDGPLQYDAATVPGVGKSKAPGSPVAGQATVLVFPDLNTGNCTYKAVQRNANVLSVGPLLQGLRKPVNDLSRGALVEDIVFTIALTAVQAKQMEG

SEQ ID NO: 1208 - protein, 352 aa, Neisseria
MTAALHIGHLSKSFQNTPVLNDISLSLDPGEILFIVGASGCGKTTLLRCLAGFEQPDFGEISLSGRTIFSKNTNLPVRERRLGYVVQEGVLFPHLTVYRNTAYGLGNGKGKTAQERQRIEAMLELTGISELAGRYPHELSGGQQQRVALARALAPDPELILLDEPFSALDEQLRRQIREDMIAALRANGKSAVFVSHDREEALQYADRIAVMKQGRILQTASPHELYRQPADLDAALFIGEGIVFPAALNADGTADCGLGRLPVQSGAPAGTRGTLLIRPEQFSLHPHSAPTASIHAVVLKTTPKARHTEISLRVGQTVLTLNLPSAPTLSDGISAVLHLDGPALFFPGNTL

SEQ ID NO: 1209 - protein, 505 aa, Neisseria
MSPKKIPIWLTGLILLIALPLTLPFLYVAMRSWQVGINRAVELLFRPRMWDLLSNTLTMMAGVTLISIVLGIACALLFQRYRFFGKTFFQTAITLPLCIPAFVSCFTWISLTFRVEGFWGTVMIMSLSSFPLAYLPVEAALKRISLSYEEVSLSLGKSRLQTFFSAILPQLKPAIGSSVLLIALHMLVEFGAVSILNYPTFTTAIFQEYEMSYNNNTAALLSAVLMAVCGIVVFGESIFRGKAKIYHSGKGVARPYPVKTLKLPGQIGAIVFLSSLLTLGIIIPFGVLIHWMMVGTSGTFALVSVFDAFIRSLSVSALGAILTILCALPLVWASVRYRNFLTVWIDRLPFLLHAVPGLVIALSLVYFSINYTPAVYQTFIVVILAYFMLYLPMAQTTLRTSLEQLPKGMEQVGATLGRGHFFIFRTLVLPSILPGITAAFALVFLKLMKELTATLLLTTDDVHTLSTAVWEYTSDAQYAAATPYALMLVLFSGIPVFLLKKYAFK

SEQ ID NO: 1210 - protein, 331 aa, Neisseria
MKTSIRYALLAAALTAATPALADITVYNGQHKEAAQAVADAFTRATGIKVKLNSAKGDQLAGQIKEEGSRSPADVFYSEQIPALATLSAANLLEPLPASTINETRGKGVPVAAKKDWVALSGRSRVVVYDTRKLSEKDLEKSVLNYATPKWKNRIGYAPTSGAFLEQVVAIVKLKGEAAALKWLKGLKEYGKPYAKNSVALQAVENGEIDAALINNYYWHAFAREKGVQNVHTRLNFVRHRDPGALVTYSGAAVLKSSQNKDEAKKFVAFLASKEGQRALTAVRAEYPLNPHVVSTFNLEPIAKLEAPQVSATTVSEKEHATRLLEQAGMK

SEQ ID NO: 1211 - protein, 321 aa, Neisseria
MSYTQLTQGERYHIQYLSRHCTVTEIAKQLNRHKSTISREIRRHRTQGQQYSAEKAQRQSRTIKQRKRQPYKLDSQLIQHIDPLIRRKLSPEQVCAYLCKHHQITLHHSTIYRYLRQDKSNGSTLWQHLRICSKPYRKRYGSTWTRGKVPNRVGIENRPAIVDQKSRIGDWEADTIVGKGQKSALLTLVERVTRYTIICKLDSLKAEDTARAAVRALKAHKDRVHTITMDNGKEFYQHTKITKALKAETYFCRPYHSWEKGLNENTNGLIRQYFPKQTDFRNISDREIRRVQDELNHRPRKTLGYETPSVLFLNLFQPLIH

SEQ ID NO: 1212 - protein, 127 aa, Neisseria
MTDTDTQADRFEQMMWQAVDKLFEQHDGKLESMDGREQELVLIWRTEADIGNGSILQFVCNWGFPAAEKTCSVLKKIGAVHSAMLIHRAADALDKEIRRLQSEGKNLKEMWDITSRQQNRLTAEQSG

SEQ ID NO: 1213 - protein, 458 aa, Neisseria
MHDKTWSGRFNEPVSELVKQYTASIGFDRRLAEWDIQGSLAHAQMLKETGVLDEGDLADIRRGMAEILEEIRSGKIEWSSDLEDVHMNIERRLTDKIGDAGKRLHTGRSRNDQVATDIRLWLRDQITVIQSLIQSLQTALLDLAEQNAETVMPGFTHLQVAQPVSFGHHMLAYVEMLGRDNERMADCRCRVNRMPLGAAALAGTTYPIQREITAELLGFEQICQNSLDAVSDRDFAIEFTAAASLVMVHLSRLSEELILWMSPRFGFIDIADRFCTGSSIMPQKKNPDVPELVRGKSGRVIGHLIGLITLMKSQPLAYNKDNQEDKEPLFDTADTLIDTLRIYADMMRGVTVKPDNMRAAVMQGFATATDLADYLVKKGMPFRDAHEVVAQAVRHADQAGVDLSELPLEVLQGFSDLIADDVYGVLTPEGSLNARNHLGGTAPEQVRFQVKRWREMLA

SEQ ID NO: 1214 - protein, 289 aa, Neisseria
MKPIRKAVFPVAGMGTRFLPATKASPKEMLPIVDKPLIQYAVEEAVEAGCTEMVFVTGRNKRSIEDHFDKAYELETELEMRHKDKLLEHVRNILPPNITCLYIRQAEALGLGHAVLCARAAIGDEPFAVILADDLIDAPKGALKQMVEVYGRSGNSILGVETVEASQTGSYGIVETEQLKQFQRITGIVEKPKPEDAPSNLAVVGRYILTPRIFDLLTNLPRGAGNEIQLTDGIAKLLDHEFVLAHPFEGTRYDCGSKLGYLEATVAYGLKHPETGEPFRRLLEKYRTE

SEQ ID NO: 1215 - protein, 199 aa, Neisseria
MSEKPEKIVLASGNAGKLEEFGNLFKPYSITVLPQSAFGIPECPEPYPTFVENALAKARHAAKYSGLPALADDSGICAAALNGAPGIHSARYAGDNPKSDTANNLKLAAELVGKADKSCCYVCVLVFVRHKDDPRPIIAEGVWHGQWNDTPLGQNGFGYDPYFYLPEHGKTAAELDTEVKNRESHRAQALAELLRKLAL

SEQ ID NO: 1216 - protein, 77 aa, Neisseria
MNRRKIYLLSVALFTLAFMLLVLLGAYLLTVGSKAFAVASFLFAFGALFGQIGSLALYLRHKSLRAAQSATKENRYV

SEQ ID NO: 1217 - protein, 177 aa, Neisseria
MADFNQILTPGDVDGGIINVVNEIPAGSNHKIEWNRKLAAFQLDRVEPAIFAKPTNYGFIPQTLDEDGDELDVLLVTEQPLATGVFLEARVIGVMKFVDDGEVDDKIVCVPADDRNNGNAYKTLSDLPQQLIKQIEFHFNHYKDLKKAGTTKVESWGDAEEAKKVIKESIERWNKQA

SEQ ID NO: 1218 - protein, 152 aa, Neisseria
MPMAKPLKYPVSALVVLYSGDGGILLIERTHPEGFWQSVTGSLEPGETVAQTARREVWEETGILLADGQLQDWHDSTVYEIYHHWRHRYPKGVFENREHLFSAEIPRDTPIALQPEEHVSYGWFDMEEAAEKVFSPSNRRAILELGRFLGKR

SEQ ID NO: 1219 - protein, 608 aa, Neisseria
MGISRKISLILSILAVCLPMHAHASDLANDSFIRQVLDRQHFEPDGKYHLFGSRGELAERSGHIGLGKIQSHQLGNLMIQQAAIKGNIGYIVRFSDHGHEVHSPFDNHASHSDSDEAGSPVDGFSLYRIHWDGYEHHPADGYDGPQGGGYPAPKGARDIYSYDIKGVAQNIRLNLTDNRSTGQRLADRFHNAGSMLTQGVGDGFKRATRYSPELDRSGNAAEAFNGTADIVKNIIGAAGEIVGAGDAVQGISEGSNIAVMHGLGLLSTENKMARINDLADMAQLKDYAAAAIRDWAVQNPNAAQGIEAVSNIFMAAIPIKGIGAVRGKYGLGGITAHPIKRSQMGAIALPKGKSAVSDNFADAAYAKYPSPYHSRNIRSNLEQRYGKENITSSTVPPSNGKNVKLADQRHPKTGVPFDGKGFPNFEKHVKYDTKLDIQELSGGGIPKAKPVFDAKPRWEVDRKLNKLTTREQVEKNVQEIRNGNINSNFSQHAQLEREINKLKSADEINFADGMGKFTDSMNDKAFSRLVKSVKENGFTNPVVEYVEINGKAYIVRGNNRVFAAEYLGRIHELKFKKVDFPVPNTSWKNPTDVLNESGNVKRPRYRSK

SEQ ID NO: 1220 - protein, 154 aa, Neisseria
MAIWNYRYYLIPSAAIRNKFNANKDIILDEYRSNGFQNFNENKSFENYFIDNDVILLSIINEAKKQLKLKESWDKDAIMFCDNFGNSLTVWPDDIECELDLRFDYTKFIQKTIDWAIKYNCLLVIEKTGNVVSPNINNLMYEIKAYLESKPWPI

SEQ ID NO: 1221 - protein, 95 aa, Neisseria
MQLEIIGSKIYTEQDFHNQISKIFSIQDYYGNNLDALWDLLSTNVERPITLVWKDAMFSKNQLENIFIEIVNVLERVKKQDEDYGFEEKFNYILE

SEQ ID NO: 1222 - protein, 412 aa, Neisseria
MIASLTGAAVGGTPVDAQTGGAVGQNAVENNLYLTSEALKKDKQTARKIYSVIKEQVKHECSSTGRITECRQNIGRIIEFTQDKRFDSRFKDLKKESLYYLNKHPDLVASYLKAEYEKLDREDKSILHRYISPGAEIVSGSLGVVLSGVAGGGSCAETFGLGCAAALVGVTSSYDHVITGTKNFGKKASEQRPTIAVQALKQLGLSEQAAEYVQFSIDLFSVGKSGGGIPKAKPVFDAKPRWEVDRKLNKLTTREQVEKNVQETRRRSQSSQFKAHAQREWENKTGLDFNHFIGGDINKKGTVTGGHSLTRGDVRVIQQTSAPDKHGVYQATVEIKKPDGSWEVKTKKGGKVMTKHTMFPKDWDEARIRAEVTSAWESRIMLKDNKWQGTSKSGIKIEGFTEPNRTAYPIYE

SEQ ID NO: 1223 - protein, 140 aa, Neisseria
MMKRIKCFCDKFPSGDTFRMCIILDDYDNRVDYYVGIYDYITSTLMSDIYYRSTIDEHFKIIELIENNPNEIYDDGGGQQFCLEFHHDKVIFYHNEFDEEDGYPVLSCSLHTFKTALIAWNAFLQLPKSIHSVVETVIEE

SEQ ID NO: 1224 - protein, 74 aa, Neisseria
MRLATKDLAEAIRKGQVRKSSFNTEQLRAIEKGESKIPDYTWHHHQDTGRMQLIREGLHHDTGHIGWEAMNKGR

SEQ ID NO: 1225 - protein, 139 aa, Neisseria
MGSNEQRKVTMWKIIKEDSDDLEFAIKCLFSQSIDLNEFKLWIEQVIRDMPIEDIPFYIFDLADFDGGIADIDNIVGFVSSCRLSKSKKNALTGIAFLRGIDVYDPPISKEKALKALEKHPEIYQKFQHFFPFVELPPL

SEQ ID NO: 1226 - protein, 129 aa, Neisseria
MWKIIKEDSDDLGFAIKCLFSQSIDLNEFKLWIEQVIRDMPIEDIPFYIFDLADFDGGIADIDNIVGFVSSCRLSKSKKNALTGIAFLRGIDVYDPPISKEKALKALEKHPEIYQKFQHFFPFVELPPL

SEQ ID NO: 1227 - protein, 313 aa, Neisseria; identical to SEQ ID NO: 157

SEQ ID NO: 1228 - protein, 422 aa, Neisseria
MKPLRRLTNLLAACAVAAAALIQPALAADLAQDPFITDNAQRQHYEPGGKYHLFGDPRGSVSDRTGKINVIQDYTHQMGNLLIQQANINGTIGYHTRFSGHGHEEHAPFDNHAADSASEEKGNVDEGFTVYRLNWEGHEHHPADAYDGPKGGNYPKPTGARDEYTYHVNGTARSIKLNPTDTRSIRQRISDNYSNLGSNFSDRADEANRKMFEHNAKLDRWGNSMEFINGVAAGALNPFISAGEAVDQWMQENPNAAETVEALVNVLPFAKVKNLTKAAKPGKAAVSGDFSDSYKHNTASRLSQSVDGEMFQTRNVDFKAKSIGTKIHDGAQGKHISGHRNYIEGKSTLNQNINPQELLNGIHSGAYPVISKGARGNPVVDFGYPIGSDGKSGLSTNFGTIHSGKNGVHIVPANPKTIKKVQ

SEQ ID NO: 1229 - protein, 105 aa, Neisseria
MNILPSWLRVGMNIAMLGMIHSDIRLITVDYEEGRRFLKIKNYLSREAITEDHEDMEYLITELWSMCGEYFDEADFECIYSNHSSMELNQINGAVFRRKELISQA

SEQ ID NO: 1230 - protein, 235 aa, Neisseria
MVKTADGYKAIARIRTGDRVFAKDEASGKTGYKPVTARYGNPYQETVYIEISDGIGNNQTLISNKIHPFYSQGKWIQAGRLKKGDTLLSESGAKQTVQNITFKQQPLKAYNLTVADWHTYFVKGSQAETEGVWVHNDCPYDKGNQRYKDASYHGKNDNSVKSRAPTNGQAALDNSVQVKSTSPRRVGVDKANNEIVVLNKTQTFNNGSAEYHGHVRSWQDLHTDQKNALKKAGLD

SEQ ID NO: 1231 - protein, 109 aa, Neisseria
MTDKSKTEKLISSDDKQSVIDGILDMVFNSKAYEVPWISEKLMELSKNKDLDIAGLSLTCFGHLARLHSNIGDYDKVIPLLHSKQDDPELQGRAEDALEDISLFLSENH

SEQ ID NO: 1232 - protein, 67 aa, Neisseria
MRTEFFKNPTLAPSTAAPWSKRQTAEKQTPSVVLPFADEYGSTPMPPKPSKPPSTLPPPKPQSWQKR

SEQ ID NO: 1233 - protein, 86 aa, Neisseria
MLLPRQHLGQNGRRLKSKHRPSCCRLRMSTGQPQCRRNRRSRLQHCRRQSRKVGKNGKTGEIKADGRKVNVRIDSTEADLLYPAGQ

SEQ ID NO: 1234 - protein, 133 aa, Neisseria
MKIKPLQFSNNNHRFYVDKICVTEQDVNILASDRNYELNIEIFIDNIIHFQITDESYKVKFSEYLFENKEKNDWDRNPAINYFFEIIDDSYMDWLKEESFDFFEKKYYKAYIFFFSDSVIEVISSTEPVFYSK

SEQ ID NO: 1235 - protein, 129 aa, Neisseria
MWKISKENCEDLGFAIVCMFYDAINLSEFKLWLDIVVRDIPIDTIPLYIFDLIDFDKSIGEIYDVIGVVNYGYISNDQKNALTGIAFLRGIDVYDPPISKEKALKALEKYPEIYQRFQHFFPFVELPLF

SEQ ID NO: 1236 - protein, 766 aa, Neisseria
MAHYAIGDIQGCFDELTALLGKIGFNHGTDTLWLTGDIVNRGPKSLETLQFCIRHENSVQIVLGNHDLHLLAVGCGEGAPKRSDTIEPILKHPDGKKMLDWLRAQPLLIREGSRVMVHAGILPQWRITKAESLAREAEAELRGKKYVKFFSKMYGNKPAAWDEGLKGYARLRFIVNAFTRMRALTFKNELDFDYKSTVKKMPPYLRPWFKAPDRQNLDAHHLRTLVLAGLHECRQRHLAGHRRAVGRTADRRQPRNGRNYPSPSRRRHRLEKLRKITDRPTMHKILPIAHVLSRLGMLFSFILLIPAALSYAFSDGAYTAFATTATVTLSGSCIVRLATLRFRRELRPRDGFTLVLMLWLAFAAMAAMPMYLYFPNMGFTDAFFESMSGLTTTGATVIPHVDGLAPSVNFWRHMLNWLGGMGIIVLAVAILPMLGVGGTQLFKAEIPGIDKESKMSPRISQVAKKLWFGYTLITILAAACLHFAGMGWFDAVCHAMATLSLGGFSTHDASIAYYNSPLIEAVIIVFTIVGGINFANHFAALNSRSLKTYWKDEECRTMLLLLSGSILAAALYLWHTGYYAGFTESLRYTAFNFVSIGLANGLANTDFAQWPLLISLWMFFLANILANSGSTGGGIKTIRALVLFKFSLREMMVLLHPKAVRTVKISGKAIPDRLALTVMSFIFIYFMTVVLFSFLLMASGMEFTTAFTAVIACITNAGPGLGEVGPAGNYAGLDVMQKWICVTAMLLGRLEIFTVFILFTPAYWKK

SEQ ID NO: 1237 - protein, 129 aa, Neisseria
MSKTIIHTDKAPAAIGAYSQAVRAGDTVYMSGQIPLDPATMTVVGNGDFRAEARQVFQNLQAVAEAAGGTLADIVKLNAYLTDLGNFAVFNEVMAEFIAEPFPARAAVGVASLPKGVQVEAEAVLVLNA

SEQ ID NO: 1238 - protein, 174 aa, Neisseria
MKKALATLIALALPAAALAEGASGFYVQADAAHAKASSSLGSAKGFSPRISAGYRINDLRFAVDYTRYKNYKAPSTDFKLYSIGASAIYDFDTQSPVKPYLGARLSLNRASVDLGGSDSFSQTSIGLGVLTGVSYAVTPNVDLDAGYRYNYIGKVNTVKNVRSGELSAGVRVKF

SEQ ID NO: 1239 - protein, 64 aa, Neisseria
MENAAASPAGRFRRHSRRRKCPTLKAQTHTKPYACTCNNPTDTAVFSKPFASFTHPPRDAAATI

SEQ ID NO: 1240 - protein, 391 aa, Neisseria
MHTISFPNRTRLTALPPLSLYIHIPWCIKKCPYCDFNSHSLKNGLPEAAYIDALLTDLQLELPNIWGRPVETIFFGGGTPSLFQAESIDRLLSGVRSLLRLQPEAEITLEANPGTFEIEKFQGFKDAGITRLSIGVQSFNDDMLSRLGRVHNGKEALTAIDTALKLFDKVNIDLMYALPNQTVQTALDDVQTAIATGATHISAYHLTMEPNTPFGHTPPKGLPQDEAALDIEDAVHGALEGAGFVHYETSAFAKPAMQCRHNLNYWQFGDYLGIGAGAHGKISYPDRIERTVRRRHPNDYLALMQSQPSEAVERKTVAAEDLPFEFMMNALRLTDGVPAAMLQERTGVPSAKIMAQIETARQKGLLETDPAVFRPTEKGRLFLNDLLQCFL

SEQ ID NO: 1241 - protein, 841 aa, Neisseria
MNPNSKHNTNFTNLLKPSDSDIKQFAAQHICRLTDLLNRYAYEYYTLDAPSVPDAEYDKLFRELEALELNHPELKLPDSPTQRVGGEPLAGFAEVRHEVPMLSLTNAFSPQDENGVFDHAEMYAFDQRVRDGLDGGNPEYVIEPKFDGLAISLLYRDGVLVQAATRGDGTTGEDVTQNIKTVSNIPLRLHGENTPELIEVRGEVLMLKADFVALNKRQAENGQKPFANPRNAAAGSLRQLDSRITAQRKLHFFPYSVARQQDGFVAEEHIQELAYFQALGFSLPNGNFGCFKNIDEVLAFYEHMQQKRPELPYEIDGMVVKVNSLAQQHELGFISRAPRWAVAHKFPAEEALTIVEAIDVQIGRTGAVTPVARLQPVFVGGVTVTNATLHNQDEVSRKDVRVGDTVVVRRAGDVIPEVVRVIFERRPMRETAVAVSDGIGHRQDDLFAETPSANQTQSVPLHKPYRLPTHCPICRSEIEREEGEAVARCSGGMLCQAQRAQGLIHFASRKAMDIDGLGEKQIEQLVAQDLVRHFADLYRLDIPTLQKMKETADKTVAESDQMPSEGSSVGASGKHKKQPVKWAENILAGIEASKTPELARFLFALGIRHVGERTAKTLAQAFGTLERVRRAPEPVLACLPDIGTVVARSIAHFFAQAEQQAMIDELLAAGVAPQTQAVTIPPARHAEPQRWIARLPGFKISENKAQALWELAGKNIEGLQTDKALPTDWQAWRSEPQNAALLENLKTFFAQMPSEDEAAQGSDGINKAVAGKTFVLTGTLPTLKRDQAQSLIEAAGGKVSGSVSKKTDYVVAGEAAGSKLEKANALGVSVLSEAELLTLLG

SEQ ID NO: 1242 - protein, 428 aa, Neisseria; identical to SEQ ID NO: 263

SEQ ID NO: 1243 - protein, 190 aa, Neisseria
MDNHAEAHWQNGWLQSIRHTPSPNFSPRETGETVSLIVLHNISLPPFEYGTDAVEKLFANRLDPDGHPFFSLIHTLRVSSHFLIKRDGETVQFVSCDNMAYHAGVSSFGGREKCNAFSIGIELEGCDFEPFAEAQYRSLEALLDAICRHYPVTAVTGHQDIAPGRKTDPGHFFDWRRIREKGFLVDRNAV

SEQ ID NO: 1244 - protein, 331 aa, Neisseria; identical to SEQ ID NO: 16

SEQ ID NO: 1245 - protein, 206 aa, Neisseria
MKPQFITLDGIDGAGKSTNLAVIKAWFERRGLPVLFTREPGGTPVGEALREILLNPETKAGLRAETLMMFAARMQHIEEVILPALSDGIHVVSDRFTDATFAYQGGGRGMPSEDIEILEHWVQGGLKPDLTLLLDVPLEVSMARIGQTREKDRFEQEQADFFMRVRGVYLDRAAACPERYAVIDSNRNLDEVRNSIEKVLDGHFGC

SEQ ID NO: 1246 - protein, 426 aa, Neisseria
MENSLKEAALKFHEFPVPGKISVTPTKSLATDKDLALAYSPGVAAPCMEIHADPQNAYKYTAKGNLVAVISNGTAVLGLGDIGALAGKPVMEGKGVLFKKFAGVDVFDIEIDEKDPQKLVDIIAALEPTFGGINLEDIKAPECFYIERELRKRCKIPVFHDDQHGTAIITAAAVLNALRFTGRKIEEATLVCSGAGAAAIACLNQLLDLGLKRENVTVCDSKGVIYQTREDKDRMDESKQFYAIEDNGQRVLADAVKGKDIFLGLSGANLLTPEILNTMNEKPIVFAMANPNPEILPPLAKETRPDVVIGTGRSDFPNQVNNVLCFPFIFRGALDVGATTINEEMKRACVYALADLAMEEVTEEVVAAYGKKFEFGAEYLIPTPFDSRLLPRVATAAAKAAMESGVATRPIADLEAYAAKLSEWKL

SEQ ID NO: 1247 - protein, 344 aa, Neisseria
MPNCFKFHTVIERHWQKPYPVLSFLLKPLSGLFAKIAAKRRTDFLSGKRQSEKLPVPVVVVGNIHAGGTGKTPIVAALVSGLQEKGVKVGIISRGYGRKSKAVHVLNAESRAEDAGDEPLLLFRKTGAPTAVGSSRAEAGRALLAAHPDIGLIVADDGLQHYALRRDVEIAVFPAADTGRTDLDLLPNGSLREPLLRLDSVDAVVVSGGKADALFRPSENMFHSRIEAGRIYRLNNPSEILDTGRLKNQTVVAVAGIAKPARFFDSLRNMGITVKRTVALPDHADISAADLPDADAVIITEKDAVKFSDGICTDNVWVLPVCAIIEPDLAAFVLERLEDVPKAV

SEQ ID NO: 1248 - protein, 195 aa, Neisseria
MNIKLKTLLLPFATLALCTNAFAAPPSDASLARWLDTQNFDRDIEKNMIEGFNAGFKPYADKALAEMPEAKKDQAAEAFNRYRENVLKDLITPEVKQAVRNTLLKNAREIYTQEEIDGMIAFYGSPVGQSVVAKNPRLIKKSMSEIAVSWTALSGKIAQHHLPEFTEELRRIICGGKNPDAGCKQAGQVGKRHQK

SEQ ID NO: 1249 - protein, 60 aa, Neisseria
MEKKFLDILVCPVTKGRLEYHQDKQELWSRQAKLAYPIKDGIPYMLENEARALSEEELKA

SEQ ID NO: 1250 - protein, 253 aa, Neisseria
MTEFVVLIPARLDSSRLPGKALADIHGKPMVVRVAEQAAKSKAARVVVATDHPDIQTACQAHGIEVVMTSNRHESGTTRLAEASVALKLPPHLIVVNVQGDEPLIAPELIDRTAEVLVENNVQMATAAHELHDFDELMNPNAVKVVLDKNRNAIYFSRAPIPYPRDAIRAGKREMPSETAVLRHIGIYAYRAGFLQRYAEMSVSPLETIESLEQLRVLWHGYPIAVETAKEAPAAGVDTQEDLDRVRAVFQTV

SEQ ID NO: 1251 - protein, 133 aa, Neisseria
MQQHIEKWQHLSREEQKILAEVWGLVQNDDQEVHYEMLKLNAPDEASGEFWFRMAETLSTLPPNRSLGLRMNGGRLATAVSILSVMIEDNPDIPQLWAQKITALNYSGLNLNQYGVASPCRTICTVCGFVALS

SEQ ID NO: 1252 - protein, 38 aa, Neisseria
MHKSILLEDVAVRNISIQEEKKCLIGYNQGKSYFISKD

SEQ ID NO: 1253 - protein, 261 aa, Neisseria
MSRIRQAFAALDGGKALIAYITVGDPDIRTTLALMHGMVANGADILELGVPFSDPMADGPVIQRAAERALANGISLRDVLDVVRKFRETDTQTPVVLMGYLNPVHKMGYREFAQEAAKAGVDGVLTVDSPVETIDPLYRELKDNGVDCIFLIAPTTTEDRIKTIAELAGGFVYYVSLKGVTGAASLDTDEVSRKIEYLHQYIDIPIGVGFGISNAESARKIGRVADAVIVGSRIVKEIENNTGNEAAAVGALVKELKDAVR

SEQ ID NO: 1254 - protein, 290 aa, Neisseria
MSWLDKILPPKIKNRGKDGSSNVPEGLWHKCPSCSATVYSTELQQNNQVCPKCNHHNPLSARQRLNLLLDEDGREEVAGNVKPTDPLKFKDGKKYPDRLSAARKLTGEDDALVVMKGKMNGLPVVVAAFEFRFIGGSMGSVVGERFVQGIRRAVADNCPFVCVAASGGARMQEGVNSLMQMTKTSAALHLLTEKRLPFISVLTDPTMGGVSASFAFLGDVVLAEPNALIGFAGPRVIEQTVRETLPEGFQRAEFLLEKGAIDQIVDRRDMKRRISDLITLLCRQDKVSAA

SEQ ID NO: 1255 - protein, 203 aa, Neisseria
MRRTALLLLALAAGTSLAAGFSQKDTPINTRYRETPEEAAAREFKEHTAKLPPLPDTHSDGWFDIYVDENYGKQPKILLDSLQIMPAPDGSIRYILNIRSDKGYDNLTAKGIFCARFSIRFGNGKPSSYKVFGYGDTVNRRWIQPRNAEWKPIGGTLSRNDALRTVLYQAFCEGGVPADTKGLVQRLKERAGRYAPSIKPHNK

SEQ ID NO: 1256 - protein, 74 aa, Neisseria
MNSETLDVTGLKCPLPILRAKKALAQMQQGDVLTVLATDGGAPGDFEAFCRQTGHVLLDASEQDGVFTLVVQHK

SEQ ID NO: 1257 - protein, 344 aa, Neisseria
MQTLTIIRPDDMHLHLRDGDALKAVAPYTARQMGRAVIMPNLKPPVVSVADALAYKARIMAALPEGSAFEPLMTLYLTDNATPELVREAKAAGIVAFKLYPAGATTNSDSGVTDLFKLIPVLEEMAKQGILFLVHGEVTDPEIDIFDREAAFIGRVMKPVLAQVPNLKVVFEHITTAEAARLVLEAGDNVAATVTPQHLLLNRNDLLVGGVRPHHFCLPVLKRETHRQALVAAVTGEKAHKFFLGTDSAPHAKSAKENACGCAGMFSAMTAIELYAEVFEKAGALDKLEAFASKNGARFYGIPENTDTITLVKQSQTVPASVPYGDGELVPMRAGGEIGWTVQY

SEQ ID NO: 1258 - protein, 141 aa, Neisseria
MKTARRRSRELAVQAVYQSLINRTAAPEIAKNIREMSDFAKADEELFNKLFFGTQTNAAEYIRQIRPLLDRDEKDLNPIERAVLLTACHELSAMPETPYPVIINEAIEVTKTFGGTDGHKFVNGILDKLAAQIRPDEPKRR

SEQ ID NO: 1259 - protein, 158 aa, Neisseria
MNTIAPNLDGKHLRIGIVQARFTNEIGSEMLKVCCRTLQELGVADENITVATVPGALEIPIALMNFASSEKFDALIAIGVVIRGETYHFELVSNESGAGVSRVALDYNIPIANAVLTTENDAQAIERIEEKASDAAKVAVECANLVNLLLEEQFEDEE

SEQ ID NO: 1260 - protein, 107 aa, Neisseria
MNAFAQALSSALDRCIATNTVAKQNRPVGFLYREAPVFENDSGWRFFSGDETDEYTDDPDNFSIVSLADIAKTNPETAALLSQPEGSAWELAEDGTFQTVADWQPQD

SEQ ID NO: 1261 - protein, 239 aa, Neisseria
MKDDVLKQQAHAAIQKKLGYAFRDISLLRQALTHRSHHAKHNERFEFVGDSILNYTVARMLFDAFPKLTEGELSRLRASLVNEGVLAEMAAEMNVGDGLYLGAGELKSGGFRRPSILADAMEAMFAAVSFDADFNTAEKVVRHLFADRVRRADFQNQAKDGKTALQEALQARRFALPKYRIEEQIGYANDSMFVISCDLGELGFVCRAKGTSRKAAEQEAAKEALKWLEEKLPLKRKKK

SEQ ID NO: 1262 - protein, 324 aa, Neisseria
MRRRVNMPSEHMDTKANMDIETFLAGERAAGGYRCGFVAIVGRPNVGKSTLMNHLIGQKISITSKKAQTTRNRVTGIYTDDTAQFVFVDTPGFQTDHRNALNDRLNQNVTEALGGVDVVVFVVEAMRFTDADRVVLKQLPKHTPVILVVNKIDKDKAKDRYALEAFVAQVRAEFEFAAAEAVSAKHGLRIANLLELIKPYLPESVPMYPEDMVTDKSARFLAMEIVREKLFRYLGEELPYAMNVEVEQFEEEDGLNRIYIAVLVDKESQKAILIGKGGERLKKISTEARLDMEKLFDTKVFLKVWVKVKSGWADDIRFLRELGL

SEQ ID NO: 1263 - protein, 208 aa, Neisseria
MRKIRTKICGITTPEDAAAAAAAGADAVGLVFFQGSSRAVDIARAKKITAALPPFVSVVALFVNESAQNIRRILAEVPIHIIQFHGDEDDAFCRQFHRPYIKAIRVQTASDIRNAATRFPDAQALLFDAYHPSEYGGTGNRFDWTLLAEYSGKPWVLAGGLTPENVGEAVRITGAESVDVSGGVEASKGKKDAAKVAAFIATANRLSR

SEQ ID NO: 1264 - protein, 163 aa, Neisseria
MSTETKNYITPAGWQALKDELYQLVNKERPEIVQIVNWAAGNGDRSENGDYLYGKRRMREIDRRIRFLTKRLEAAVVVDPELREATDQVFFGATVGLLRDDGREQTVKIVGIDEIDTAQNKISWISPLARCLIKAREGDEVVLNTPEGREEIEILSVEYIKID

SEQ ID NO: 1265 - protein, 514 aa, Neisseria
MCGVLGLVSHEPVNQLLYDGLQMLQHRGQDAAGIATAEGGTFHMHKGKGMVREVFRTRNMRDLTGNAGIAHVRYPTAGNAGSSAEAQPFYVSSPFGIVLAHNGNLTNTAELYENVCNKHLRHVNTSSDSEVLLNVFAHELRREVSKNADPHRLNADNIFNAVAQVHRLVRGAYGVIAMIAGYGMLAFRDPYGIRPLVLGSQTDSEGRKSYAVASESVAFNALTYDLERDIRPGEAVFVGFDGTMIARQCSDRAKLSPCLFEYVYFARPDSVIDGVSVYQSRLDMGVSLAEKIKRELPVDGIDVVMPIPDTSRPSAMELAVHLDKPYREGLIKNRYIGRTFIMPGQATRKKSVRQKLSPMETEFAGKSVLLVDDSIVRGTTSREIVEMVRAAGARKVYIASAAPEVRYPNVYGIDMPTREELIANGRSAAEIAAEIGADGIVFQDLGDLEAVVKALNPKIESFDSSCFNGIYQTGDIDDAYLDRLSAEKSGCGGLKIHPSRMEHSISISDAGDEE

SEQ ID NO: 1266 - protein, 165 aa, Neisseria
MNSLPIADLLVSAVIAACIVLSAMRGVIAEAGSMAAWVVSFFFAKLFAASFADLAFASFQPRLFALALSFISLFVIACLIQKMLRSLLTSAVSAVGLGFANRILGGVFGALKGVLIVTLLVMLASKTDLPDTEEWRQSYTLPFFVSLSEAVLNHSGGTAETPEDD

SEQ ID NO: 1267 - protein, 332 aa, Neisseria
MSENKQNEVLSGYEQLKRRNRRRLVTASCLVAASCILLAAALSSGPAEQTAGETSGVENKAAGAAQTPALKSAADKPQDLAGEDKPSAADSEISEPENVGAPLVLINERLEDSNIKGLEASEKLQQAETAKTAPKQAKQRAAEKVPATADSTDTVAVEKPKRTAETKPQKAERTAKAKPKAKETKTAEKVADKPKTAAEKTKPDTAKSDSAVKEAKKADKAESKKTAEKDRSDGKKHETAQKTDKADKTKTAEKEKSGKKAAIQAGYAEKERALSLQRKMKAAGIDSTITEIMTDNGKVYRVKSSNYKNARDAERDLNKLRVHGIAGQVTNE

SEQ ID NO: 1268 - protein, 424 aa, Neisseria
MKTLQDWLSHLETAHSGGLIDMGLERTSEVKKRMKLEPQCPVVVVAGTNGKGSVCAYLTQIYKQAGYKIGTLTSPHLLRYNERIAINAEPVSDDTIIASFERIEAARGEISLTYFEFNALAAVDIFMREQVDVMILEVGLGGRLDAVNAFDGDCAVVTSVDLDHQAFLGDTVEQVGFEKAGVFRSGKPAICGQNPAPKSLLSHAEAIGAKLLMVQRDFEFHAMENIQWNYRFRPQHSDDPARNRNALPFPALRGTYQLSNAACALTVLECLNDKLPVDIGAIKRGLLLVENPGRFQVLPGRPLTVLDVGHNPHAARALRRSLINLAFAQKRTAVFSMLSDKDIDGVLETVKDQFDEWYIAPLDVPRGMTLESLQNKLHEHSIENIQTFAAVREAYRAAASKAGENDRIVVFGSFHTVADVMSVL

SEQ ID NO: 1269 - protein, 148 aa, Neisseria
MRAFQTALRPSRILNILTVSLHAASLAVCLTWFYGRMMWFGLAALVASYAYSLRITNLKHRHAITAITIDRDGQAEIVSGKDKTAKAAALSGSSMVTPYALFLQWDTGGKTVRQCIMPDMTDKESYRKLKVWVLWRQPKKTAETDTSD

SEQ ID NO: 1270 - protein, 119 aa, Neisseria
MYFVDRTAVVLKPTARFLEWLKSTDENMPDLTIEQLRANCSVFLVPQFDEPEAVVSYFDERYRQIFEAELAGWDIDKDKWPQDMGLKAFWEFFDIEIHDIVLNMEEAELNITPVFDNMM

SEQ ID NO: 1271 - protein, 242 aa, Neisseria
MIKFKNVHKHFKDLHVINGVNLEIKKGEVVVVCGPSGSGKSTLIRTVNQLESIESGEIWVDGVNVADPKTDLNKIREEVGFVFQGFNLYPHLTVLENITLAPMKVKGQNAEQAEKKAMELLERVGLAHKKDAFPSQLSGGQQQRVAIARGLAMEPRVMLFDEPTSALDPEMVGEVLKVMKDLAESGMTMMCVTHEMGFAREVADRVIFVDKGQILEDETPEAFFTNPKHERAKQFLQQVMTH

SEQ ID NO: 1272 - protein, 259 aa, Neisseria
MKEHKARKRFGQNFLQDTRIISDIVNAVRPQADDVVIEIGPGLAAITEPLAKKLNRLHVVEIDRDIVCRLKTLPFADKLVIHEGDVLQFDFNGIAGKKKIVGNLPYNISTPLLFKLAEVADDVVDMHFMLQKEVVERMVAAPKSNDYGRLGVMLQYFFDMEMLIDVPPESFDPAPKVDSAVVRMIPVKHRIGKADDFEHFAKLVKLAFHQRRKTIRNNLKELAGDDDLQAVGINPQDRAEHIAPEKYVALSNYLAGKVV

SEQ ID NO: 1273 - protein, 229 aa, Neisseria
MLFEGLPCLAVWCKNRLSAVLPVGGLNVSENLLEIETHPFDPVLPPKAAVMMMGTFPPKEDKRAMQFHYPNFQNDMWRVYGLVFFNDAAHFQRLSEKAFDAEKIKAFLHERGIASCPTVLKAVRQHGNASDKFLKVVETVDLAAVLAKIPECRHICTTGGKATEILLDIQGGGIKMPKTGETVPFPFAGRDLTLTRLPSTSRAYPLSLAKKAAAYRAFFEMAGLCEKQL

SEQ ID NO: 1274 - protein, 400 aa, Neisseria
MKNYHAPDEKGFFGEHGGLYVSETLIPALQELADAYKAAKNDPEFWEAFRHDLKHYVGRPSPVYHAARLSEHLGGAQIWLKREDLNHTGAHKVNNTIGQALLAKRMGKKRVIAETGAGQHGVASATVAARFGMTCDVYMGADDIQRQMPNVFRMKLLGANVVGVESGSRTLKDAMNEAMREWVARVDDTFYIIGTAAGPAPYPEMVRDFQCVIGNEAKAQMQEAIGRQPDVAVACVGGGSNAIGLFHPYIGEENVRLVGVEAGGLGVNTPDHAAPITSGAPIGVLHGFRSYLMQDENGQVLGTHSVSAGLDYPGIGPEHSHLHDIKRVEYTVAKDDEALEAFDLLCRFEGIIPALESSHAVAWAVKNAPKMGKDQVILVNLSGRGDKDINTVAKLKGIKL

SEQ ID NO: 1275 - protein, 1815 aa, Neisseria
MKTKRFKINAISLSIFLAYALTPYSEAALVRDDVDYQIFRDFAENKGKFFVGATDLSVKNKQGQNIGNALSNVPMIDFSVADVNRRTLTVIDPQYAVSVKHVKGDEISYYGHHNGHLDVSNDENEYRSVAQNDYEPNKNWHHGNQGRLEDYNMARLNKFVTEVAPIAPTSAGGGVETYKDKNRFSEFVRVGAGTQFEYNSRYNMTELSRAYRYAIAGTPYQDVNVTSNLNQEGLIGFGDNSKHHSPEKLKEVLSQNALTNYAVLGDSGSPLFAYDKQEKRWVFLGAYDYWAGYQKNSWQEWNIYKKEFADEIKQRDNAGTIKGNGEHHWKTTGTNSHIGSTAVRLANNERDANNGQNVTFENNGTLVLDQNINQGAGGLFFKGDYTVKGINNDITWLGAGIDVADGKKVVWQVKNPNGDRLAKIGKGTLEINGTGVNQGQLKVGDGTVILNQQADADKKVQAFSQVGIVSGRGTLVLNSSNQINPDNLYFGFRGGRLDANGNDLTFEHIRNVDEGARIVNHNTGHASTITLTGKSLITDPKTISIHYIQNNDDDDAGYYYYRPRKPIPQGKDLYFKNYRYYALKSGGSVNAPMPENGQTENNDWILMGSTQEEAKKNAMNHKNNQRISGFSGFFGEENGKGHNGALNLNFNGKSAQNRFLLTGGTNLNGKISVTQGNVLLSGRPTPHARDFVNKSSARKDAHFSKNNEVVFEDDWINRTFKATEIAVNQSASFSSGRNVSDITANITATDNAKVNLGYKNGDEVCVRSDYTGYVTCNTGNLSDKALNSFGATQINGNVNLNQNAALVLGKAALWGQIQGQGNSRVSLNQHSKWHLTGDSQVHNLSLADSHIHLNNASDAQSANKYHTLKINHLSGNGHFHYLTHLAKNLGDKVLVKESASGHYQLHVQDKTGEPNQEGLNLFDASSVQDRSRLSVSLANNHVDLGALRYTIKTENGITRLYNPYAENRRRVKPAPSPATNTASQAQKATQTDGAQIAKPQNIVVAPPSPQANQAEEAKRQQAKAEQVKRQQAEAERKSAELAKQKAEAEREARELATRQKAEQERSSAELARRHEKEREAAELSAKQKVEAEREAQALAVRRKAEAEEAKRQAAELARRHEKEREAAELSAKQRVGEEERRQTAQSQPQRRKRRAAPQDYMAASQDRPKRRGHRSVQQNNVEIAQAQAELARRQQEERKAAELLAKQRAEAEREAQALAARRKAEAEEAKRQAAELAHRQEAERKAAELSANQKAAAEAQALAARQQKALARQQEEARKAAELAVKQKAETERKTAELAKQRAAAEAAKRQQEARQTAELARRQEAERQAAELSAKQKAETDREAAESAKRKAEEEEHRQAAQSQPQRRKRRAAPQDYMAASQNRPKRRGRRSTLPAPPSPSFDSSAYAAPRALHNPDWYENDYEEIPLDALEDENVSESVDTSDKQPQDNTELHEKYENDYEEIPLDALEDEDVSESVDTSDKQPQDNTELHEKVETVSLQPRAAQPRAQAATQLQAQAAAQADAVSTNTNSALSDAMASTQSILLDTGASLTRHIAQKSRADAEKNSVWMSNTGYGRDYASAQYRRFSSKRTQTQIGIDRSLSENMQIGGVLTYSDSQHTFDQASGKNTFVQANLYGKYYLNDAWYVAGDIGAGSLRSRLQTQQKANFNRASIQTGLTLGNTLKINQFEIVPSAGIRYSRLSSADYKLGNDSVKVSSMSVKTLTAGLDFAYRFKVGNLTVKPLLSAAYFANYGKGGVNVGGNSFVYKADNQQQYSAGAALLYRNVTLNVNGSITKGKQLEKQKSGQIKIQIRF

SEQ ID NO: 1276 - protein, 84 aa, Neisseria
MTNPSVRKPAPRHSHEPPSRHYHESGNLGLRVKKTYIPSFPQKQKTKIRNLKSRHSRKSGNPKTKSRRNLTEEPNPENRLPAFA

SEQ ID NO: 1277 - protein, 691 aa, Neisseria
MLCVLAGAAYGVFRTEAALSSQWRAEAVSGVPLTVEVADMPRSDGRRVQFAAKAVDSGGRTFDLLLSDYKRREWAVGSRWRITARVHPVVGELNLRGLNREAWALSNGIGGAGTVGADRVLLHGGSGWGIAVWRSRISRNWQQADADGGLSDGIGLMRALSVGEQSALRPELWQAFRPLGLTHLVSISGLHVTMVAVMFAWLAKRLLACSPRLPARPRVWVLAAGCAGALFYALLAGFSVPTQRSVLMLAAFAWAWRRGRLSAWATWWQALAAVLLFDPLAVLGVGTWLSFGLVAALIWACSGRLHEGKRQTAVRGQWAASVLSLVLLGYLFASLPLISPLVNAVAIPWFSWVLTPLALLGSVVPFAPLQQLGAFLAEYTLRFLVWLADVSPEFAVAAAPLPLLVLAVCAALLLLLPRGLGLRPWAVLLLAGFVFYRSPGVPENEVAVTVWDAGQGLSVSVQTANHHLLFDTGTASAAQTGIVPSLNAAGVRRLDKLVLSHHDSDHDGGFRAVRNIPAGGIYAGQPEFYEGARHCAEQRWQWDGVDFEFLRPSERKNIDDNGKSCVLRVVAGGAALLVTGDLDTKGEESLVGKYGGNLYSQVLVLGHHGSNTSSSGVFLNAVSPEYAVASSGYANAYKHPTEAVQNRVRAHGIKLLRTDLSGALQFGLGRGGVKAQRLRGYKFYWQKKPFE

SEQ ID NO: 1278 - protein, 267 aa, Neisseria
MKKILLTVSLGLALSACATQGTVDKDAQITQDWSVEKLYAEAQDELNSSNYTRAVKLYEILESRFPTSRHAQQSQLDTAYAYYKDDEKDKALAAIDRFRRLHPQHPNMDYALYLRGLVLFNEDQSFLNKLASQDWSDRDPKANREAYQAFAELVQRFPNSKYAADATARMVKLVDALGGNEMSVARYYMKRGAYIAAANRAQKIIGSYQNTRYVEESLAILELAYKKLDKPRLAADTRRVLETNFPKSPFLKQPWRSDDMPWWRYWH

SEQ ID NO: 1279 - protein, 374 aa, Neisseria
MQNTSFDNESDYSDDSDFASASETENRIGLTVPLELAGGRLDAVLAKLLPDYSRSRLTSWIKEGAVIVNDKPSQPKDKMIGGEQICVTVRPSEENLAFVPEPMALDIVYEDDTVIVVNKPAGLVVHPAAGNWTGTLLNGLLAHCPELSQVPRAGIVHRLDKETSGLMVVAKTLPAQNSLVRQLQERTVKRIYRAVANGIVPFDGKIETQIGRDPHNRLKMAVVKFGGKPAVTHVKVLERYLTHSYIECSLETGRTHQIRVHMREANHPLAADPVYGNPRHPCGDTVKEAVKSLGARQALHAYRLSFTHPESGETVSFEAPIPNDIYHLLSVLRLEAGLDSSLSNEEEWQDKFGADDDDDWNEDDYDVEVVYVRE

SEQ ID NO: 1280 - protein, 315 aa, Neisseria
MNILSKISSFIGKTFSLWAALFAAAAFFAPDTFKWAGPYIPWLLGIIMFGMGLTLKPSDFDILFKHPKVVIIGVIAQFAIMPATAWLLSKLLNLPAEIAVGVILVGCCPGGTASNVMTYLARGNVALSVAVTSVSTLISPLLTPAIFLMLAGEMLEIQAAGMLMSIVKMVLLPIVLGLIVHKVLGSKTEKLTDALPLVSVAAIVLIIGAVVGASKGKIMESGLLIFAVVVLHNGIGYLLGFFAAKWTGLPYDAQKTLTIEVGMQNSGLAAALAAAHFAAAPVVAVPGALFSVWHNISGSLLATYWAAKAGKHKKP

SEQ ID NO: 1281 - protein, 259 aa, Neisseria
MKTITETLNLAPKGKNFLTADWPAPANVKTLITTRNGGVSQGAYQSLNLGTHVGDNPEAVRRNREIVQQQVGLPVAYLNQIHSTVVVNAAEALGGTPDADASVDDTGKVACAVMTADCLPVLFCDRAGTAVAAAHAGWRGLAGGVLQNTIAAMKVPPVEMMAYLGPAISADAFEVGQDVFDAFCTPMPEAATAFEGIGSGKFLADLYALARLILKREGVGGVYGGTHCTVLERDTFFSYRRDGATGRMASLIWLDGNAV

SEQ ID NO: 1282 - protein, 159 aa, Neisseria
MNKLFLTAAVLMLGACGFHLKGADGISPPLTYRSWHIEGGQALRFPLETALYQASGRVDDAAGAQMTLRIDSVSQNKETYTVTRAAVINEYLLILTVEAQVLKRGEPVGKPMTVSVRRVLAYADNEILGKQEEEAALWAEMRQDAAEQIVRRLTFLKAE

SEQ ID NO: 1283 - protein, 332 aa, Neisseria
MAAHIGRIDTDAPLKPLYVIHGEEELLRIEALDALRAAAKKQGYLNREVYTADNAFDWNELLQTAGSAGLFADLKLLELHIPNGKPGKTGGEALQDFAARLPEDTVTLVLLPKLEKTQLQSKWFAALAAKGEVWEAKPVGAAALPQWIRGRLDKIGLGIEADALALFAERVEGNLLAARQEIDKLGLLYPKGHTVNIDEAQTAVANVARFDAFQLAGAWMKGDVLRVCRLLDGLREEGEEPVLLLWAVAEDVRTLIRLAAALKQGQSIQSVRNSLRLWGDKQTLAPLAVKRISVVRLLDALKTCAQIDRIIKGAEDGDAWTVFKRLVVSLAE

SEQ ID NO: 1284 - protein, 139 aa, Neisseria
MDNKTKLRLGGLILLTTAVLSLIIVLIVDSWPLAILLAAVIVAAAAGGFVWTSRRQQRQFIERLKKFDIDPEKGRINEANLRRMYHSGGQHQKDAITLICLSQKCSVDEAHAMFKKRPTRQEINQMAAKQSRGQKRPHR

SEQ ID NO: 1285 - protein, 188 aa, Neisseria
MPSEACWRFRRHILIEKMMTLKTAPLKRRFAAMLYEMLLVGAATCLAALIAGIAAIFLNPVSIAVSALVTSILIMGAWWLYFRANWHGQGQTLAMRTWKIGLCDLNGIQPSLHLLRLRFIWACIFIVFIPMLAYAGLRHFLGIPPKGAAGAALIWLILPWGFALLNPDRQFLYDFLAGTRLVAVKGKP

SEQ ID NO: 1286 - protein, 294 aa, Neisseria
MSSGNIHIHSMTGFANAAAECGSKRINLDLRAVNHRFLDIQIRMPDDLRYLESGIREKISSHIARGKVECKIQIQDAENGSQSLELNRDLVGQLAEINKDLRKHHDLAKLGVADILRFPGVLASQRENTEELAKSITELTEKALKDFTAARKREGKKLGEHLLQRLEAMEEIIDALSELFPTLLETHKEKIRARLVEAVGSIDNDRLQQEFALFIQKSDIDEEFSRLRTHIAEVRRIVTEHKGSSGKRLDFLMQELNREANTLGSKSIAAECTQASVELKVLIEQMREQVQNIE

SEQ ID NO: 1287 - protein, 290 aa, Neisseria
MSQMNNAFALPAIQSGNGSLEQYIHTVNRIPMLTQEEETRLAERQHKGDLNAAKQLILSHLRVVVSIARGYDGYGLNQADLIQEGNIGLMKAVKRYEPGRGARLFSFAVHWIKAEIHEFILRNWRLVRVATTKPQRKLFFNLRSMRKNLNALSPKEAQDIADDLGVKLSEVLEMEQRMTGHDIAIMADNSDDEDSFAPIDWLADHDSEPSRQLSKQAHYALQTEGLQNALAQLDDRSRRIVESRWLQDDGGLTLHQLAAEYGVSAERIRQIEAKAMQKLRGFLTEEAEAV

SEQ ID NO: 1288 - protein, 524 aa, Neisseria
MFRRYLPNRQMNMVSKLDKYWQHPALYWPLLILFAAATPFTFAPYYHFWLMPLIFGAFVRLIELRPRFAVSSAYLFGLTAYTTQFYWIHTALHDVSGLPDLYAVPLTFLLPAYLALYPALCFWLWKKFTLPRGIKIGLVLPILWTLTEFARERFLTGFGWGAIGYSQITPDSPLAGFAPLGGIHMVTLATAFLGVWLVLASNNTARSGKRLLPIILIAALLAAGYTARQTDFTRPDGSRSTVALLQGNIDQTLKWREDQVIPTIQKYYEQVGKTTADIVILPETAIPVMRQNLPENILAKFAEQAQNNGSALAVGISQYTSDGNGYENAVINLTGYQENNQDGIPYYAKNHLVPFGEYKPLPFLTTPLYKMMDMPLSDFRKGGGKQSALLMKNQKIAFNICYEDGFGDELIAAAKDATLLANASNMAWYGKSNAMYQHLQQSQARAMELGRYMVRATNTGATAIISPKGNIIAQAQPDTETVLEGHIKGYVGETPYMKTGSSWWLMGILALAALILFIFRNKEH

SEQ ID NO: 1289 - protein, 251 aa, Neisseria
MAFASLFTLPDDITAVLDDVALMTKAAAKKTAGVVGDDLAPNANRVTGVSAERELPIVWSMAKGSFSNKPVLVPAALLLSAFLPQLITPLLTAGGIYLCFEGVEKLLHKFLHRHDAHARNGGNRHRHDCFGVRNRCRHRQTRRLRHAADAPPTNLFAQFGANADCLYALLYARFERGRHACHVSYRRRTGRPQPRPSARFPARATLGRWLGGVLRQPRCRAAFRFDCLRPRLAADESFRQALIPFSNTDAV

SEQ ID NO: 1290 - protein, 106 aa, Neisseria
MDWMGSLFLPGGALLFLSVVSTTLSARLGMPLLLVSPANVLDRAAEALAIAAFLMLVARPSAVFGGLWKFNYSLREKAYSRIEMQSDTVLQAGIWRGTSCPTARSI

SEQ ID NO: 1291 - protein, 96 aa, Neisseria
MAKYFTETGISVREHFDFFGEFVVSPAARSGDLALTYGLRLEAGEEGLSLAELFDKRSDSQEPVEGGRIDIGGFMLTAKEVDGGGNIGSMGLKVLR

SEQ ID NO: 1292 - protein, 138 aa, Neisseria
MKETPMNTTRLPTALVLGCFCAAASAADNSIMTKGQKVYESNCVACHGKKGEGRGTMFPPLYRSDFIMKKPQVLLHSMVKGINGTIKVNGKTYNGFMPATAISDADIAAVATYIMNAFDNGGGSVTEKDVKQAKSKKN

SEQ ID NO: 1293 - protein, 360 aa, Neisseria
MPSEAASDGILPLYPTRTIFQKPIMLPFFPEPSLSYTQQNRTAVLLLNLGTPDAPTAQAVRPYLKSFLTDRRVVELPKWLWYPILHGLVLTLRPKKSAHAYEKIWFKEGSPLEVYTARQAAALAKRMPDLIVRHAMTYGNPSVADVLSELKAQGAGRLLVIPMYPQYAASSSGAAVDKVCEQLLLQRNQMSVRTVSRFYDDTGYIDAMKNHILRYWAEHGRGKKLMLSFHGVPQKHHDLGDPYPDECRHTAKLLAEALELTEDQYVVSFQSQFGRAKWVTPSTQDLFGKLPKQGVTELDVFCPGFLADCLETMEEIALMGREQFYEAGGKSYRYIPCLNDNPDWIDALVALAEENLGSWR

SEQ ID NO: 1294 - protein, 371 aa, Neisseria
MLKFTLHKKDGLARRGTLELNHGKIETPVFMPVGTYGSVKAMNPQNLHDIKAQIILGNTYHLWLRPGLEVIGQFGGLHGFIGWDKPILTDSGGFQVFSLSDMRKLTEEGCTFKSPINGDKLFLSPEISMKIQTVLNSDIAMQLDECTPGEATREQARKSLQMSLRWAERSKKAFEDLKNPNALFGIVQGAMYEDLREESLRGLEQFDFPGLAVGGLSVGEPKPEMYRMLRAVGPILPEHKPHYLMGVGTPEDLVYGVAHGIDMFDCVMPTRNARNGWLFTRFGDLKIKNAKHKLDKRPIDESCTCYACQNFSRAYLHHLHRTGEILGAQLNTIHNLHFYQVIMAEMREAVEQGKFADWQARFHENRARGTD

SEQ ID NO: 1295 - protein, 637 aa, Neisseria
MLNITLPDGSVRQYESPVTVAQIAASIGAGLAKATVAGRVNGKLVDACDPIVEDSAVQIITPKDQEGIEIIRHSCAHLVGHAVKQLYPNAKMVIGPVIEEGFYYDIATEKPFTPEDVAAIEARMKELIAQDYDVVKIMTPRAEAIKIFQERGEEYKLRLIDDMPEVEAMGMYHHQEYVDMCRGPHVPNTRFLKNFKLTKLAGAYWRGDSNNEMLQRIYGTAWATKDELKAYIQRIEEAEKRDHRKLGKQLDLFHLQDEAPGMVFWHPKGWALWQVIEQHMRKELNAAGYKEVKTPQIMDKTFWEKSGHWDNYKDNMFVTSSEKREYAVKPMNCPGHVQIFNNGLRSYRDLPMRLAEFGSCHRNEPSGALHGLMRVRGFVQDDAHIFCTEDQIVSEARAFNELLIRIYKQFGFHDVSVKLSLRPEKRAGSDDVWDKAEQGLREALTACGVEWGELPGEGAFYGPKIEYHVRDALGRSWQCGTLQLDFVLPERLNAEYVTENNDRARPVMLHRAILGSLERFIGILIENHAGSFPLWLAPVQLVIMNITENQADYCREVAAKLQAAGFRAELDLRNEKIGYKIRDNSQYRFPYQIVVGDKEKQENKVAVRRKAEDLGSLDLDDFIAQLQQEITDALVNH

SEQ ID NO: 1296 - protein, 155 aa, Neisseria
MRLISESGEQLGVVSVREALAMAEGQDVDLVEISPTAKPPVCKLMDYGKYKYQQAKKRDEAKKNQKQVQIKEIKFRPGTDEGDYQIKMRNINRFLADGDKVKVTLRFRGREMAHQQLGAQLLERVKEDLAEVAQIESFPKMEGRQMVMMIAPKKK

SEQ ID NO: 1297 - protein, 65 aa, Neisseria
MPKMKTKSSAKKRFKVLGNGGVKRAHAFKRHILTKKTTKNKRQLRGTSMVNDRDLASVAKMLPYA

SEQ ID NO: 1298 - protein, 119 aa, Neisseria
MPRVKRGVTARARHQKIFALAKGYRGRRKNVYRVAKQAVMKAGQYAYRDRRQRKRQFRQLWIVRINAGTRENGLSYSKFMNGLKRASIEIDRKVLADLAVFDKAAFAQLVEKAKAALAA

SEQ ID NO: 1299 - protein, 330 aa, Neisseria
MENVNRIVAEGIAAVEAAQDFNALEQIKARYLGKTGELTGLLKTLGQMSPEERKTIGAHINECKNRFQTAFNAKREALNEVKLQARLAAEALDITLPGRAQEGGSLHPVTLTLQRVVELFHGMGFEVADGPEIEDDFHNFQALNIPANHPARAMQDTFYVENGDVLRTHTSPIQIRYMLDKKEPPIRIIAPGRVYRVDSDATHSPMFHQAEGLWVEEGVTFADLKAVFTDFIRRFFERDDLQVRFRPSFFPFTEPSAEIDIMGENGKWLEVGGCGMVHPNVLKNVNIDPEKYTGFAFGIGLDRFAMLRYNVNDLRLFFDNDLNFLKQFAK

SEQ ID NO: 1300 - protein, 352 aa, Neisseria
MMIGASLFSSAGIAETYLHNAGIKIIAANELVPERANLYKALYPESKMIIGDILHEEVFQNLIQSVPNRLDFLIASPPCQGMSVAGKNRNIQEMANDKRNHLIFRVIEFILLKRPTFVLIENVPFFLKIKLPYKGTLQTVEVILQDLFGCEYYIQTHIFDSADYGVAQHRKRAIIRMNKHSTIWGMPEKVTKTISVRDAISFLPSIESGQKSNVKWHFARTHAPEHIIWLKNTPTGRSAFDNIEHYPKKKNGEKIKSYNTTYRRMEWDAPAPTITIRNDAISSQLNVHPGRSMPDGTYSDARVLTPLELMLLTSLPIDWNIPDDTSELLIRQCIGESIPPLLIKKIVERIGK

SEQ ID NO: 1301 - protein, 489 aa, Neisseria
MTTARWVIDKHLQNFHILCKFAGILKTNSFISVEDKAKLSEKLEKLDLYHRRNTGKSLDATTHKIKELSFYMFGYRDVCGQVTQKFLFSPLGNLFLKHLDNNEYIQKIFLTMLWAIPFPHPYIKTDESIQLYPMRLIFKLLSDERLDCKLFSYEYIYLISFVKSADQNSYEKLVQDILVLRTCAEVKIKHQLTAENSRSHAYVNAAHEWESYFSKTLTDAGVLQKTDGKIICRLKHGKTETYRKVTSSEFSIPKQLQEFVKKLQSAYSFSEMPLNLNDSDRLKIDVIKEIYSFYPKELLEEIGELKDEAAYELLHLPRLIEQYADNNNGTEAYLFEDVLEMGFNMFYNVEAKKIGGPGNTDLECLYITQKRKFAVEAKSTKNKLSGINSGRLEDHKNKIKAIYTIVVTPRYVPAVLSDIRNCPIVIIRANTFAEFLYNCLINRSSIPEIDYRYFDEIIIKNLGKDISSEISNLTMQQFASNTTMEAYST

SEQ ID NO: 1302 - protein, 216 aa, Neisseria
MITISNEDNMILMSRYPDKYFDLAIVDPPYGILNKTKRGGDYKFNMNEYSQWDIKPDQTYFNELFRVSKNQIIWGGNYFGELWLRSEYNKGFIIWDKNQPETLNNFSMAEMAWSSFDRPSKIFRFSVRKNRNKTHPTQKPVELYQWLLKMYAKQGDKILDTHLGSGTLAIACCIAQFDLTACEINSDYYQQSIEKIKNNLPEARISFGHPGYCIIE

SEQ ID NO: 1303 - protein, 787 aa, Neisseria
MQFSYSWLKTQADTELSSDKLEHLLTMSGLEVEEAETAAPAFAGVVIAEVKSVEKHPDADRLNVTRVDAGTGGLVQIVCGAPNVKAGIKVPCSLPGAVLPGNFKIKPTKMRGEVSDGMLCSTDELGLPDDGVNGLHILPEDAPVGTNIREYLDLDDTLFTLKITPNRADCLSIKGIAREVSALTGCAFRQPEIHTAPITGSRKQPVQINAPADCGRFISRVIENVNARATTPDWMKQRLERSGIRSISALVDIGNYVMLEIGQPMHVFDADKLSGSLHIRRAREGETLECLNEKTVSLSENTLVVADEKGVLSLAGLMGGAASAVSDGTQNIVLEAAWFAPEIIAGKSRQYGFGSDSSFRFERGVDYRLQADAIERATELVLQICGGAAGEMVEAQGELPEAKQVGLRLDRLKTVLGVDIPAEQVETILQHLGLQPEKTAEGFRVTAPSFRFDIEIEADLIEEIGRVYGYENIPDDYTSGRLKMLELPETRRPRFAVYNEMAARGYREVVSYAFVDEQWEQDFAANADPIRLQNPLAAQYAVMRSTLIGGLVEILQNNLNRKQNRVCVFEIARVFSKGSDGQFVQNERIGGLWYGAVMPEQWGGKTRNADFYDIKADVENLLKNKAVEFVKTGHPALHPGRAANIVSDGKVIGFVGELHPKWLQKYDLPQAPLVFEIDMAAVLECGKTRYRVVSKFQPVRRDLAFVMPEAMSHDDLLLVLKGAANKLVQEISVFDVYRGTGLPEGMKSVAVKVILQDMENTLTDEAVEPLIGKLIGAATAAGARLRS

SEQ ID NO: 1304 - protein, 100 aa, Neisseria
MTLTKAELADILVDKVSNVTKNDAKEIVELFFEEIRSTLASGEEIKISGFGNFQLRDKPQRPGRNPKTGEEVPITARRVVTFHASQKLKSMVEHYYDKQR

SEQ ID NO: 1305 - protein, 161 aa, Neisseria; identical to SEQ ID NO: 140

SEQ ID NO: 1306 - protein, 75 aa, Neisseria
MNVWYIWDRMVEIYHKYKKPCLVLAVDFVMGMVFIEPNEEPCIGRCYAPMSESPDFANAVAMAVAMICIVWIAVL

SEQ ID NO: 1307 - protein, 433 aa, Neisseria
MPSEHQHISSLLDFDRTHLLHPYTSMTDPLPVYPVKRAEGVFIELADGTRLIDGMSSWWCAIHGYNHPVLNQAVETQMKQMAHVMFGGLTHEPAVELGKLLVGILPQGLNRIFYADSGSISVEVALKMAVQYQQARGLTAKQNIATVRRGYHGDTWNAMSVCDPETGMHHIFGSALPQRYFVDNPKSRFDDEWDGADLQPVRALFEVHHADIAAFILEPVVQGAGGMYFYHPQYLRGLHDLCDEFDIMLIFDEIATGFGRTGKMFACEHAEVVPDIMCIGKGLSGGYMTLAAAITSQKVTETISRGEAGVFMHGPTFMANPLACAVACASVKLLLSQDWQANIRRIESILKGRLKAAWDIRGVKDVRVLGAIGVIELEKGVDMARFQADCVAQGIWVRPFGRLVYLMPPYIISDGVLTKLADKTVQILKEHSK

SEQ ID NO: 1308 - protein, 215 aa, Neisseria
MKGVYFVSGIDTDIGKTVATGVLAKQLLQQGKSVITQKPVQTGCQNIADDIAVHRKIMGIPMQEADKRRLTMPEIFSYPASPHLAARLDGRALDLDKIRTATQELAAQYEVVLVEGAGGLMVPLTENLLTIDYIRQQGYPVILVTSGRLGSINHTLLSFAALKQYGIRLHSLVFNHIHDSRDAHIAQDSLSYLKCRLKADFSEAEWMELAKTDAV

SEQ ID NO: 1309 - protein, 158 aa, Neisseria
MEHLFGKWLPDLPAAISDGISLPMVRLLHTRSLTAALRALPHTFSVELLKLGELETECGGRLVREVLLKLDRIPVVEARSECRIGSAFWQNILDCGTRPLGERLFQADLEGARSAFEFAVAGEGCGRYFAARRSRFSRHGEEMLLTEYFLPELKRFIG

SEQ ID NO: 1310 - protein, 296 aa, Neisseria
MNPKSPLFLRLSDRLDVYLRLMRADKPIGTLLLLWPTYWALWLASDGIPDLAVLAAFTIGTFLMRSAGCVINDFADRDFDGAVERTKNRPFAQGRVKKKEALLLTAFLCLLAALCLIPLNHLTWLMSLPALFLALTYPFTKRFFPIPQLYLGLAFSFGIPMAFAAVAGNVPPQAWILFAANVLWTLAYDTVYAMADKEDDLKIGIKTSAVTFGRYDIAAVMLCHGGFTLLMAVLGAVIGAAWAYWTAIPIVLLLQYRQYAAIKSRVRQICFETFLANNRIGWVWFTAIFAHTFFAK

SEQ ID NO: 1311 - protein, 149 aa, Neisseria
MSLIGEILPLSHIVLDMEVGSKKRLFEEAGLLLERESSLSHADVFECLFAREKLGSTGLGQGVAIPHGRHAGVKQATGAFIRTREPVGFDAPDGKPVSLIFILLVPENATGEHLEVLSKLAGKFSQKSIRESLMTVSSAEEVRAILTEE

SEQ ID NO: 1312 - protein, 320 aa, Neisseria
MPSISVRRLFDDNQYKLQLAWAAGNSGADNRIGVEADKPVLALVGHLNFIHPNQIQVVGLAESEYLNRLESGETGYQFGDLFDISMSLVIVANGLPVSPGLRDYCHKNDIPLLTSKLESPYLMDVLRIYLQRTLAASSVKHGVFLDVFEIGVLITGHSGLGKSELALELISRGHSLIADDAVELFRIGPETLEGRCSPMLRDFLEVRGLGILNIRHIFGETSIRPKKILQLIINLVEADDEYMKQLDRLSIRTETESILNVNVRSVTLPVAVGRNLAVLVEAAVRNYILQLRGKDSTREFLERHQTQLKENEQHNEDRPD

SEQ ID NO: 1313 - protein, 284 aa, Neisseria
MKIVLISGLSGSGKSVALRQMEDSGYFCVDNLPLEMLPALVSYHIERADETELAVSVDVRSGIDIGQAREQIASLRRLGHRVEVLFVEAEESVLVRRFSETRRGHPLSNQDMTLLESLKKEREWLFPLKEIAYCIDTSKMNAQQLRHAVRQWLKVERTGLLVILESFGFKYGVPNNADFMFDMRSLPNPYYDPELRPYTGMDKPVWDYLDGQPLVQEMVDDIERFVTHWLPRLEDESRSYVTVAIGCTGGQHRSVYIVEKLARRLKGRYELLIRHRQAQNLSDR

SEQ ID NO: 1314 - protein, 505 aa, Neisseria
MAIQWFPGHMNKAKKAIAERAKSVDMVIEMLDARMPASSENPLLAQLSKGKPKLKILNKQDLADPERTKIWLEHYNSRPDTCAIALDSSETGAHGKITQACRAMIPHRQGIDKPLRVLICGIPNVGKSTLINGMIGKKSAKTGNEPGITKAEQRLFLADDFWLYDTPGMLWPKIIVEEGGYNLAAGGAVGRNALDEEEVALELLDYLRRHYLPMLQERYQADKDPSSHWDENVWLEWIAKKRGAVLSGGRINYQKAAENILTDFREGKIGRITLETPNQWETWLKKARQKEAELKAIREARKAERKGQKLRKHKECRLKNIFQAASLYSNRFQTAYPNPCRFSTDTRMTDKISPDALIEAALLTQTEPLTEKSMRELCVPPLSQDKLIDVLAQLKTRWQDRALQLVHTQEGWRFQIVQTAFERLGSLQEQRAPRYSRAVMETLAIIAYQQPVTRGDIEGIRGVAVSQNVMQTCRIGGGLKSSDIGTHWENPHCGRQRQRSSAIWV

SEQ ID NO: 1315 - protein, 557 aa, Neisseria
MLLTLSLRDFVIVENLNLDFQSGFTVLTGETGAGKSITLDAIGLLLGDKADYSQVRSGAKEAQLSALFDISHLPVLKAELYEQGLLNDGEEELSIRRIIDAKGKSRSFINNQAATLAQLKAVGSQLIDIHGQNAHHSLNQEAAQRELLDAFAGSREQAETVRQLYQNWANAKKALQEAQEHADAVIIERERLEWQFNELNQLDIKQGEWEALSQSHDSLAHSAELLQAAEEVGSKIDGDNGIQRHIYQCQKLLANLQNIEPRFAESLNMLASIEAELGEISANMRDVAGRSDINPNELAAQEQRMGELMGMARKYRIEPEELPAKLAEIEERLQSLQAAADLDALEHNVAHNFAEYQEAAHILSAMRHQAAERLSGETTEHMQHLAMKGARFDIVLLPSSPTAHGLEQVQFQVAANKGNPPRLLNKVASGGELARISLALQVVASQYTQVPTLIFDEVDTGIGGGVAEMVGKALRALGRKHQVLAVTHLPQVASCGENHWRVRKHSEGEQTVSEISILDEIQRIEEVARMLGGEVITDTTRQHAAELLQLASKNSLF

SEQ ID NO: 1316 - protein, 479 aa, Neisseria
MQCLQFDSINLIEHILPDVRFWLVPPSRTHHLHEHFHHISWQTEAIPQTESKPDKPWFALPQTSERQKPEHILVIGAGISGAATAHALASHGISVTVLEARKAAQAASGNRQGLLYAKISPHDTEQTELLLAGYGYTKRLLGHILPESETWGGNGIIHLNYSRTEQQRNHELGLQKHHNHLYRSITSAEAEKIAGIPLSVPYDHPSCGLYWQHGVWLNPPAFVRTLLNHPLIGLHEDTPLTDISHDGEKWIASTPNGTFTATHIIYCTGANSPYLPETNLAALPLRQIRGQTGLTPSTPFSEQLRCAVSGESYISPSWHGLHCYGASFIPNSSHTGWNEAEEASNRQALAHLNPALSESLFAANPNPQKHQGHAAIRCDSPDHLPLVGALGDIAAMRQTYTKLALDKNYRIDTPCPYLPNAYVNTAHGTRGLATAPICAAAIAAQILGLPHPFSQRLRHALHPNRTIIRAIVRRKDLTP

SEQ ID NO: 1317 - protein, 119 aa, Neisseria
MNNIPVEIRLLKNRTVLVLTYGDEPKNLPAEFLRVYSPSAEVRGHGVGQDVLQTGKADVQIADLQPVGQYALKISFSDGHDSGLYDWAYLHRLAYGYDAMWQEYLDKLAAAGASRFEEK

SEQ ID NO: 1318 - protein, 245 aa, Neisseria
MGGQKTHFGFSTVNEDEKAGKVAEVFHSVAKNYDIMNDVMSAGLHRVWKHFTINTAHLKKGDKVLDIAGGTGDLSRGWAKRVGKEGEVWLTDINSSMLTVGRDRLLNEGMILPVSLADAEKLPFPDNYFNLVSVAFGLRNMTHKDAALKEMYRVLKPGGTLLVLEFSKIYKPLEGAYDFYSFKLLPVMGRLIAKDAESYQYLAESIRMHPDQETLKQMMLDAGFDSVDYHNMSAGIVALHKGVKF

SEQ ID NO: 1319 - protein, 159 aa, Neisseria
MPESIFKQISLDILKLHRDSVYSLLATSGCNCQVHEAAYVNIDGKYYIALSCEPEVGEVKTGILLIEDESRNLRLSWVGSARELDCKDNAYKRALSALSRKLGRCKDRLHTAVQPFLLELVPEKGRFSVGDEEVWISRNDLVRALYPVGYSMRQAVFQI

SEQ ID NO: 1320 - protein, 164 aa, Neisseria
MNNRHFAVIALGSNLENPAQQVRAALDTLSSHPDIRLKQASSLYMTAPVGYDNQPDFVNAVCTVSTTLDGIALLAELNRIEADFGRERSFRNAPRTLDLDIIDFDGISSDDTRLTLPHPRAHERSFVIRPLAEILPDFVLGKHGKVAELSKRLGNQGIRLLPDR

SEQ ID NO: 1321 - protein, 124 aa, Neisseria
MQYLIVKYSHQIFVTITILVFNIRFFLLWKNPEKPLAGFWKALPHLNDTMLLFTGLWLMKITHFSPFNAPWLGTKILLLLAYIALGMMMMRARPRSTKFYTVYLLAMCCVACIVYLAKTKVLPF

SEQ ID NO: 1322 - protein, 188 aa, Neisseria
MLLQNILPFAHCLLRKALPEGGNALDGTAGNGHDTLFLAQTAGIRGKVWAFDIQPQALNNTRCRLQEAGYSNVRLILDGHENLKQYIPKPLDAAIFNFGWLPGGDKSLTTRTETSIAALSATLSLLKENGMLIAVLYPGHENGKQEAEAIEQWAKNLPQEQFAVLRYGFTNRKNSPPYLLVFEKLRQK

SEQ ID NO: 1323 - protein, 97 aa, Neisseria
MTAKGQMLQDPFLNALRKEHVPVSIYLVNGIKLQGQVESFDQYVVLLRNTSVTQMVYKHAISTIVPARSVNLQHENRPQAAPTSTLVQVETVQQPAE

SEQ ID NO: 1324 - protein, 312 aa, Neisseria
MSIHTLKRLPSSLLLGLCLSLPSAHLFADNDILGQFLEQNMLTSSDPIEIFAESTIHPTNTQAITGGLILSSQSALVVNNKTGQILYQKNADRIMPIASISKLMSAMVVLDANLDMNETVTITPDEIDRIKGTGSRLAIGTALTRKKLLHLSLMSSENRATHALGRTYPGGMGAFVAAMNRKAQSLGMYGSRFYEPTGLNFQNVSTAKDLSLMVNAAAQYPQIRTNSTSNYASVQTKNGQQNYKNSNALVREGMWNIELQKTGYIREAGRSMVVKANIQNQPVTIVLLNSPTSATRVNDARKIESWMLQQRS

SEQ ID NO: 1325 - protein, 146 aa, Neisseria
MDVKYEFTLPSSSGADFHSAEHLPLVVYFYPKDSTLGCTTEGLDFNARLEQFEALGYTVVGISRDGVKAHQNFCAKQGFRFELLSDKDETVCRLFDVIKLKKLYGKESLGIERSTFVLNKDGEIAHEWRKVKVAGHAQEVLETLSR

SEQ ID NO: 1326 - protein, 291 aa, Neisseria
MEEGLIDRLLETLWLDRRLSQNTLNGYRRDLEKIARRLSQSGRMLKDADEADLAAAVYVDGEQRSSQARALSACKRLYIWMEREGIRTDNPTRLLKPPKIDKNIPTLITEQQISRLLAAPDTDTPHGLRDKALLELMYATGLRVSEAVGLNFGNVDLDRGCITALGKGDKQRMVPMGQESAYWVERYYTEARPLLLKGRNCDALFVSQKKTGISRQLAWMIVKEYASQAGIGHISPHSLRHAFATHLVRHGLDLRVVQDMLGHADLNTTQIYTHVANVWLQGVVKEHHSRN

SEQ ID NO: 1327 - protein, 66 aa, Neisseria
MFVCICNAVTDHQIKETIAAGATTMGDLQSQLGVASCCGCCGELAASFLTAHNAQPTVTAGINVQA

SEQ ID NO: 1328 - protein, 77 aa, Neisseria
MKLTLMFREYCSLCHKMRDELKPFQDEYGFGLEVVDVDENPVLEEKYNELVPVLLAGDEEICHWFLDEDRLKQFLER

SEQ ID NO: 1329 - protein, 36 aa, Neisseria
MPSEAGLQAAFFSNQRSLRFCGADDLPVKEARLDAW

SEQ ID NO: 1330 - protein, 47 aa, Neisseria
MLHINPFFILFVGWEDSYLLIFSIKIRKFIVRCYCWQSYHVLLLMEA

SEQ ID NO: 1331 - protein, 306 aa, Neisseria
MRILLTGSKSQLARCLRDRLPEDWETIATDSASLDITDADAVCNMVKSFQPDAIVNTAAYTAVDKAEGDAAAAFAVNASAVYNLALAAHRAHARFIHISTDYVFDGKGKRPYQESDFTNPSNVYGQSKTAGELLALSANPDSLILRTSWLFSEYGDNFIRTMLNLARERSPLSAVHNQIGCPTYAGDLSATIIRLLQHSNPVRGIYHYAGSKSVSWYEFAQHIFQAASQQQTSFPVPELTAVSDKEYPTAAPRPAYSILDCRKIENDFGIKPSDWQKALHRSFPSCSDAARPSVSAVKHRLGGFLI

SEQ ID NO: 1332 - protein, 287 aa, Neisseria
MSEIGLVKIYFGKVRDLYEIDDKRMLMVASDRLSAFDVILDDPIPSKGEILTQISNFWFKKLAHIMPNHFTGQTVYDVLPENEAKALEKRAVVAKKLTPVKVEAIVRGYLAGSGWKDYQKTGSVCGIQLPEGMQEAQQLPEVIFTPSTKAAVGDHDENISFEECGRIIGKELAEEVRAKAVRLYTEAAEYAKSRGIIICDTKFEFGLDENGTLTLMDEVLTPDSSRFWPADQYKVGTNPPSFDKQFVRDWLEQSGWNKKAPAPKVPADVIQKTVEKYREALTLLTQD

SEQ ID NO: 1333 - protein, 707 aa, Neisseria
MMFDKHVKTFQYGNQTVTLETGEIARQAAAAVKVSMGDTVVLVAVTTNKEVKEGQDFFPLTVDYLERTYAAGKIPGGFFKREGKQSEKEILTSRLIDRPIRPLFPEGFYHDIQIVAMVVSVDPEIDSDIPAMLGASAALVLSGVPFAGPIGAARVGYVNGVYVLNPTKAELAKSQLDLVVAGTSKAVLMVESEAKILPEDVMLGAVVYGHDQMQVAINAINEFADEVNPELWDWKAPETNEELVAKVRGIAGETIKEAFKIRQKQARSAKLDEAWSAVKEALITEETDTLAANEIKGIFKHLEADVVRSQILDGQPRIDGRDTRTVRPLNIQTSVLPRTHGSALFTRGETQALAVATLGTSRDEQIIDALSGEYTDRFMLHYNFPPYSTGEVGRMGAPKRREIGHGRLAKRALLAVLPKPEDFSYTMRVVSEITESNGSSSMASVCGGCLSLLSAGVPLKAHVAGIAMGLILEGNKFAVLTDILGDEDHLGDMDFKVAGTTEGVTALQMDIKIQGITKEIMQIALAQAKEARLHILDQMKAAVAGPQELSAHAPRLFTMKINQDKIREVIGKGGETIRSITAETGTEINIAEDGTITIAATTQEAGDAAKKRIEQITAEVEVGKVYEGTVVKILDNNVGAIVSVMPGKDGLVHISQIAHERVRNVGDYLQVGQVVNVKALEVDDRGRVRLSIKALLDAPAREENAAE

SEQ ID NO: 1334 - protein, 242 aa, Neisseria
MCRTAANHPFSRKIFDFKLPMNHDITFLTLFLLGFFGGTHCIGMCGGLSSAFALQLPPHINRFWLILLLNTGRVSSYTAIGLILGLIGQVGVSLDQTRVLQNILYTAANLLLLFLGLYLSGISSLAAKIEKIGKPIWRNLNPILNRLLPIKSIPACLAVGILWGWLPCGLVYSASLYALGSGSAATGGLYMLAFALGTLPNLLAIGIFSLQLKKIMQNRYIRLCTGLSVSLWALWKLAVLWL

SEQ ID NO: 1335 - protein, 283 aa, Neisseria
MNTLKFTKMHGLGNDFMVIDAVSQDFTPEDAPIAEWADRFRGVGFDQLLVVGRSETEGVDFRYRIFNADGSEVGQCGNGARCFARFVADKGLTDKKEICVETANGVIFPKLSDNGMVTVNMGKPKFMPSEIPFVPESGEGDDACIYGVHLESGIQPVSCVNMGNPHAVIVVDDVECAPVRETGSLIEPHRQFPERVNVGFMQVVGRTAIRLRVFERGVGETQACGTGACAAVVAGIRLGLLDEGKTVEVVLPGGTLYIEWACGGDVMMTGPAEAVFEGELAYS

SEQ ID NO: 1336 - protein, 75 aa, Neisseria
MVLGEYYAVAGHIGFGGKADARHMGNDPRRALVHPPFLPDFGQHIFFHRALEPENRWKRMAGRPRTSAARAFCRQ

SEQ ID NO: 1337 - protein, 152 aa, Neisseria
MCVGALLLFGNGSSVCVCGTAQTLCAEAGLLVRVAVCADGGCLCPPLRYRPAAAVNVRRLAAATRRVDGSVDAGLGTGAAAFRNWKIIRCGRIGTKSYKERNFGYWFFRRHRFRIKPYPKFVYVSAQIPCNRTGCLWGLRLTVETLLFRSRR

SEQ ID NO: 1338 - protein, 310 aa, Neisseria
MKIANSITELIGNTPLVKLNRLTEGLKAEVAVKLEFFNPGSSVKDRIAEAMIEGAEKAGKINKNTVIVEATSGNTGVGLAMVCAARGYKLAITMPESMSKERKMLLRAFGAELILTPAAEGMAGAIAKAKSLVDAHPDTYFMPRQFDNEANPEVHRKTTAEEIWRDTDGKVDVFVAGVGTGGTITGVGEVLKKYKPEVKVVAVEPEASPVLSGGEKGPHPIQGIGAGFIPTVLNTKIYDSITKVSNEAAFETARAIAEKEGILVGISSGAAVWSALQLAKQPENEGKLIVVLLPSYGERYLSTPLFADLA

SEQ ID NO: 1339 - protein, 301 aa, Neisseria
MGKGGDIVVGNGKKYAAPLLVLGCVVFGLGSLIVRSVPVGSYAIAFWRLLISVFVFWFLARFFRQKFPKNRKTVRYALTAGVFLAFDLALWHESIHAVGPGISTLLNSLQIFFLSAIGVFFFGERLSGLKKAGLISAVAGVAMIAGAEFGYNGNAVWGFASGLVSGLMLALSMVFVRKTHEIEPVALFPSMMILSLGGAVSLVVPALLMDGGALYPTTWKDAGLVLVYGVVMQCFAWAMVAYAIPLLSLSLTGLLLLSEPVAALFIDYFGLGKPIEGVQWAGVALTLSAIYLGSLKRQSSH

SEQ ID NO: 1340 - protein, 339 aa, Neisseria
MNTMLMSGAAAALLAGIILYFKSDKKRQENGEWSSGLEYAYILTAVGVFAALSLFMSFTAVFLIFVVLCGTAWGVYKYRLKTHPEISESSHFGDYFGSFFPTVLVLFLIRSFIAEPFQIPSSSMRPGLIKGDFILVGKFSYGLRVPVLNNIFIPTGKIERGDVVVFNYPLQPEMTYIKRIVGIPGDVVEYRDKILTVNGKPTSDIPDGTYRYPDDTDPSEIHNTDMFRSGLDGKSFNILKKEGQPAVSLPVLGKYTSDIMSENGYSIEQSGLEHCQYADDGSGFVCKVPEGRYFAMGDNRDNSADSRYWGFVDDKLVVGKAMFILMNFGDFGRSGTAIR

SEQ ID NO: 1341 - protein, 597 aa, Neisseria
MKNIRNFSIIAHIDHGKSTLADRFIQYCGGLDLREMSTQVLDSMDIEKERGITIKAQTAALNYKARDGQVYQLNLIDTPGHVDFSYEVSRSLSACEGALLVVDASQGVEAQTVANCYTAIDLGVEVVPVLNKIDLPAADPERVEQEIEDIIGIDAVGAVQCSAKSGIGVEDVLEEIVAKIPAPTGDENAPLQAVIVDSWFDNYVGVVMLIRVKNGTIKLKDKVRFMSTKAETQVEQLGVFTPKSVQKQELKAGEVGFLITGVKELGQAKVGDTVTLVANPATEPLPGFQEVQSQVFAGLYPVESHDYEALRDALEKLQLNDASLKFEPEVSQALGFGFRCGFLGLLHLEIVQERLEREFDMDLITTAPTVIYEVVLKSGEKIEVENPSKLPDIGSIETILEPIITATILVPQEYVGNVMTLCNQKRGVQVNMQYMGRQVMLTYDLPMNEVVMDFFDKLKSTSRGYASLDYHFKEFQPSDLIKLDIMVNGEKVDALSLIVHRQSAVHRGRELASKMRELIPRQMFDIAVQAAIGSQIIARENVKALRKNVLAKCYGGDITRKKKLLEKQKAGKRRMKQVGNVEIPQSAFLAILQVSDK

SEQ ID NO: 1342 - protein, 233 aa, Neisseria
MSLKTVAVIGAMEQEIELLREMMENVKAVSFGRFSAYEGELAGKRMVLALSGIGKVNAAVATAWIIREFAADCVINTGSAGGLGKGLKVGDVVIGTETAHHDVDVTAFGYAWGQVPQLPARFASDGILIEAAKRAARTFEGAAVEQGLIVSGDRFVHSSEGVAEIRKHFPEVKAVEMEAAAIAQTCHQLETPFVIIRAVSDSADEKADISFDEFLKTAAANSAKMVAEIVKSL

SEQ ID NO: 1343 - protein, 370 aa, Neisseria
MTAKEELFAWLRHMNQNKGSDLFVTTHFPPAMKLDGKITRITDEPLTAEKCMEIAFSIMSAKQAEEFSSTNECNFAISLPDTSRFRVNAMIQRGATALVFRTITSKIPKFESLNLPPVLKDVALKKRGLVIFVGGTGSGKSTSLASLIDYRNENSFGHIITIEDPIEFVHEHKNCIITQREVGVDTENWMAALKNTLRQAPDVILIGEIRDRETMDYAIAFAETGHLCMATLHANSTNQALDRIINFFPEERREQLLTDLSLNLQAFISQRLVPRDGGKGRVAAVEVLLNSPLISELIHNGNIHEIKEVMKKSTTLGMQTFDQHLYQLYEKGDISLQEALKNADSAHDLRLAVQLRSRRAQSSSPDLELL

SEQ ID NO: 1344 - protein, 325 aa, Neisseria
MIYPWHNEQWRQIAEHWERRPNAWLFAGKKDTGKTTFARFAAKALLCETPAPGCKPCGECMSCHLFGQGSHPDFYEITPLSDEPENGRKLLQIKIDAVREIIDNVYLTSVRGGLRVILIHPAESMNVQAANSLLKVLEEPPPQVVFLLVSHAADKVLPTIKSRCRKMVLPAPSHEEALAYLRERGVAEPEERLAFHSGAPLFDEADGVRALRIKLLDILAEPRLLKILDYAALFDKEKLPLAVFVGWMQKWLVDLGLCLQHMKPVYYPAYEDRLLQTVSGFRPRNVFAAEDMLKQLAPYGFHTLNVKMQIEHLLINYLELKKENG

SEQ ID NO: 1345 - protein, 116 aa, Neisseria
MSDGQNIPAKMMSLQLKDMNLLYSSYMPFLEHGGLFVQTNDVFSIGDDILLAVEILNFPKLFLPTKVAWINPARTSSKPKGVGLAFTKHENCLKVKDQIEVELGNTIGGSRPTFTM

SEQ ID NO: 1346 - protein, 259 aa, Neisseria
MHIIDSHCHLNFEGLKERLPEVLSNMEANGVGQALAISVSRESFSEVFAIAEAHEHIYCTIGVHPDSKEAEEFSIAEMVEAAAHPKVVGIGETGLDYYWCKGDLSWQHKRFADHIEAANQTGLPVIVHTRDAAADTLSILKECRVNSGVIHCFSEDIGFARAAMDLGLYISFSGIVTFKNAPLVQEAAKYVPDDRILVETDAPFLAPVPKRGRQNEPAFVRHTAEHIAKLRNQTLEQVAAYTTENFYRLFKKVPDMRTV

SEQ ID NO: 1347 - protein, 71 aa, Neisseria
MKAIHPYACPRCCRLPANTFRTGMANSASKFCIAKGGRREAKKDESGGGYALCHLPDSRIVEEWEYFRSQY

SEQ ID NO: 1348 - protein, 103 aa, Neisseria
MASIHDQIKEVVTTHRVVLFMKGTKQFPQCGFSSRAVQILNAAGCTDYVTVNVLENPEVRQGIKEYSDWPTIPQLYVNGEFVGGSDILMEMYEAGELQELLKA

SEQ ID NO: 1349 - protein, 208 aa, Neisseria
MNVNVINHPLVRHKLTLMREADCSTYKFRTLATELARLMAYEASRDFEIEKYLIDGWCGQIEGDRIKGKTLTVVPILRAGLGMLDGVLDLIPTAKISVVGLQRDEETLKPISYFEKFVDSMDERPALIIDPMLATGGSMVATIDLLKAKGCKNIKALVLVAAPEGVKAVNDAHPDVTIYTAALDSHLNENGYIIPGLGDAGDKIFGTR

SEQ ID NO: 1350 - protein, 106 aa, Neisseria
MNFQDYLATFPSIDHLGGLDVQDADGKTVHHIPAVQGKLGSLKLYNALAERFDGKLGKEAAEQGLIWFAEHVADARAHPGKHPNIDLLENVVQSGETWLLKPLSAQ

SEQ ID NO: 1351 - protein, 139 aa, Neisseria
MKKMFLSAVLLLSAAAQTVWADTVFSCKTDNNKYIEVQKINRNLYEYSFGSAAKKEIAIRNSKADLLGRSDRWQGMGSGRWATMKFQNGEFMYTIWTGFDSVTHTESSGVVVERRGKEVARVGCTPKTAQANFNDDDFS

SEQ ID NO: 1352 - protein, 246 aa, Neisseria
MLIVRPSGRAAEDVETCLNAGWRAEVLSPVEIEADAAGLELLSEQYARADAVFWVSPTAVETAVPYLNLSDGIKAQIAVGQGSRRALERCLVRTVIAPDDGNDSEAVLRLPVWNSLPEGARVLFVRGHGGRDFLMNALQEKGFRTEVAEVYFRRHKPLNFQNFQTENIAAAYITSTELVRLLFGQLPPQFSRFFKSLLYFTHHPRIAEALKREGVCSVETVPTLEAALSHSSISVSDGMVFPGTSN

SEQ ID NO: 1353 - protein, 424 aa, Neisseria
MPSETSSPRKENETEVHIPAAPFIVKQSGSNALAVCALVLAALGLGTSGFLFVQGQNVLKNQELAFNQKIDKAALGESENAALLKDNLNRQAAIQSELDRLDGNVKANGEQILEMQKSYRELTKGRADWLVDETETILNLAAQQLVLTGNIQTAVGVLEHIDSRLSRFNQAELLPIKQAVSSDLAELKNRPYVDISGTALRLDRLETAVSGLPLMLDGVLKPGVQVKNEAASASWWQNVWEKSLGTLKGLVEIRRLENNDAMLISPEQAYFVRENLRLRLLDARTALMQRNSEVYQGDLNNAEAAVRQYFDAKSPATQSWLKELAELKALDVRMTADDGLKNSLNAVRAYRDGTRMTAAENQEAEQAASEPANEKTASEPAAASDVKTIEAPSLPSERKPEQPAKKQTVPEKAGRSPSAKGERA

SEQ ID NO: 1354 - protein, 407 aa, Neisseria; identical to SEQ ID NO: 376

SEQ ID NO: 1355 - protein, 146 aa, Neisseria
MGSSDSFKEKKEIFEIGTPAYRQKLIDVWKKSINGNEKSWVLFENGTCVILLEPEKDLAKQAKEMLSKWGKVQIGTPSADFGIITLDSGDGYAVSCHHPEIFTLILKEEGLDEDFKIGIEGRSHRDCDAEEPKVIHIEDKRTIETP

SEQ ID NO: 1356 - protein, 354 aa, Neisseria
MISLKNDTFLRALLKQPVEYTPIWMMRQAGRYLPEYKATRAKAGSFLDLCKNTELATEVTIQPLERFDLDAAILFSDILTVPDAMGLGLYFAEGEGPKFKRALQHEADIAKLHVPDMEKLQYVFDAVTSIRKALDGRVPLIGFSGSPFTLACYMVEGGGSKEFRTIKTMMYSRPDLLHKILDTNAQAVTAYLNAQIDAGAQAVQIFDTWGGVLSDAAFKEFSLKYIRQIVAGLKRESEGRRVPVIVFAKGGGLWLESMAQIGADALGLDWTCNIGEARRRVGKQVALQGNFDPFALFGTPESIRTEVARILADYGHGSGHVFNLGHGINQHADPEHAKILVDTVHELSRQYHGG

SEQ ID NO: 1357 - protein, 459 aa, Neisseria
MAKTLKTLYQCTECGGTSPKWQGKCPHCGEWNTLQESLAAPEPKNARFQSWAADTSTVQSLSAVTATEVPRNPTGMGELDRVLGGGLVDGAVILLGGDPGIGKSTLLLQTIAKMAQSRKVLYVSGEESAQQVALRAQRLELPTDGVNLLAEIRMEAIQAALKQHQPEVVVIDSIQTMYSDQITSAPGSVSQVRECAAQLTRMAKQMGIAMILVGHVTKDGAIAGPRVLEHMVDTVLYFEGDQHSNYRMIRAIKNRFGAANELGVFAMTENGLKGVSNPSAIFLASYRDDTPGSCVLVTQEGSRPLLVEIQALVDDAHGFTPKRLTVGLEQNRLAMLLAVLNRHGGIACFDQDVFLNAVGGVKIGEPAADLAVILAMLSSFRNRPMPEKTVVFGEIGLSGEVRPVARGQERLKEAEKLGFKRAIVPKANMPRNAKEFPNLKIYGVSSLQEAIDICRDSRE

SEQ ID NO: 1358 - protein, 159 aa, Neisseria; identical to SEQ ID NO: 179

SEQ ID NO: 1359 - protein, 119 aa, Neisseria
MNIKHLITAALIASAAFAAQAAPQKPVSAAQTAQHPAVWIDVRSEQEFSEGHLHNAVNIPVDQIVRRIHEAAPDKDTPVNLYCRSGRRAEAALQELKKAGYTNVANHGGYEDLLKKGMK

SEQ ID NO: 1360 - protein, 1204 aa, Neisseria
MSASIQAFDPLTVPISGTNLIEASAGTGKTYGIAALFTRLIVLEQKNVERVLVVTFTKAATAELKTRLRGRLDDVLQVLESKGIAKLGDDTLSDGIAAYCAEHHEGDTFLPELLKQALQKEGRTRLIVRLKAAIGQFDNAAIYTIHGFCQRILRDYAFLCQAPFDVEMTEEDGDRLLIPAQDFWRERVSNDPVLAALALKRKAVPQTVLAQISRYLSRPYLNFRRPQADLKQAQRNAETSWQTICRLLPELEAGFWRIHPDLNGNSYRKNSFGNLFKELAQKSAAGQLPFLDKDTHDRLLKLASDKLEAGLKKGKTPDAAVFAELQKLADFGRDLNALEEAEEATMIRLQLDLIEYLNRSLAEMKKSRRERGFDDLLLDVHTALTDNPHADTLARAVAENWETALIDEFQDTDPLQYEIFQKIFIAQNRPLFLVGDPKQAIYSFRGADIYAYLQAAEDARHRYTLATNYRSHAALIGSIGALFRLKERPFVLENIGYSEVGAARAESRLSPERPAVQVRWLHENDNEKANKDVLRRRAADYCADEIAHALNEAARGRLNFKGCPLQSGDIAVLVRTHNEAVMVSAALKKRQVQSVLLSRESVFASPEAAALSALIGFWLEPRRAGTLRFVLTSSIFGYDAQQLHDFNQNESEILHWAESARTALDNWNKYGIFAAMQQFSQTHGIETRLLSRNNGRSLTNYFQLLELLAAEDAQNRNPAALHKWLGDQISLAENNSGDNRAIRLESDEDLVKIVTMHASKGLQYPLVYCPFAWDAQDTGPSDWQILHQGANRTELLAKAQLSEDEQKQYADEEMAERLRLLYVALTRAEEQLNIYAAYSTNTADNPLAYLIEGSPQDSRETVRRAYACEKDGIAMLKRNWRRVADNAPSGTNFAFTENAPPPAAYRSNAGQTAEFAANSIPERGFRFVRHTSFTALSRHTQTPDGGEEDACPSLDAAETSVPAMPSETPTASDGISIHDFPKGTQAGLCLHEILEDFKFGQAAAGQETLIADKLKKYGFEEIWLPAVAEMAEACRKTPLTGAYDLSDISPECRCPEMGFTLHTEDFSLKRLRDWFARDDIRLPEVCRAAAETLDFHTVNGFLNGFVDMVCQDPDGNICVIDYKSNHLGTDASAYTQQAMDEAVAHHHYYLQALIYAVAAARYFKLRGQPPAAVSVRYLFLRGLDGKGGGVWRWDIDAAALEQIK

SEQ ID NO: 1361 - protein, 302 aa, Neisseria
MNTPQSAIIPDHAQAGIFIEADFAANRLNDIKAACRASLDALTALKARFPDDILGLTIAFGSKAWATFGHTDEGSEIKPFSEMGNGLAPSTQHDMSIHIQSFRQNAAYALAQSVLGAFGDSICVASEEHGLRLYQDRGLDGFVDGTENPQGDENVREVAIIPEGKPDAGGSYVLLQKYLHDLKKWDAVPVAEQEASVGRGKETDDEFGRDVRLPDSHLGRVNLKENGVGLKIVRRSLPFGKISGEHGLMFTAYCRTLHNIEAQLLSMFGDTDGKTDLLLRHLSAAVSGGYYYAPSVERLQNL

SEQ ID NO: 1362 - protein, 275 aa, Neisseria
MMLKKFVLGGIAALVLAACGGSEGGSGASSAPAQSAVSGSLIERINNKGTVTVGTEGTYAPFTYHDKDGKLTGYDVEVTRAVAEKLGVKVEFKETQWDSMMAGLKAGRFDVVANQVGLTSPERQATFDKSDPYSWSGAVLVVRNDSNIKSIADIKGVKTAQSLTSNYGEKAKAAGADLVAVDGLAQSLTLIEQKRADATLNDELAVLDYLKKNPNAGVKIVWSAPADEKVGSGLIVNKGNDEAVAKFSTAINELKADGTLKKLGEQFFGKDISVQ

SEQ ID NO: 1363 - protein, 220 aa, Neisseria
MIVSAFLPMVKAGFAVSLPLAAASFVIGMMIAVAVALVRIMPAGGIVRKILLKLVEFYISVIRGTPLLVQLVIVFYGLPSVGIYIDPIPAAIIGFSLNVGAYASETIRAAILSVPKGQWEAGFSIGMTYMQTFRRIVAPQAFRVAVPPLSNEFIGLFKNTSLAAVVTVTELFRVAQETANRTYDFLPVYIEAALVYWCFCKVLFLIQARLEKRFDRYVAK

SEQ ID NO: 1364 - protein, 251 aa, Neisseria
MIKIRNIHKTFGENTILRGIDLDVCKGQVVVILGPSGSGKTTFLRCLNALEMPEDGQIEFDNERPLKIDFSKKPSKHDILALRRKSGMVFQQYNLFPHKTALENVMEGPVAVQGKPAAQAREEALKLLEKVGLGDKVDLYPYQLSGGQQQRVGIARALAIQPELMLFDEPTSALDPELVQDVLDTMKELAQEGWTMVVVTHEIKFALEVATTVVVMDGGVIVEQGSPQDLFDHPKHERTRRFLSQIQSTKI

SEQ ID NO: 1365 - protein, 460 aa, Neisseria
MASIARDIFKAYDIRGIVGKTLTDEAAYLIGKAIAAKAAEKGITRIALGRDGRLSGPELMEHIRRGFTDSGINVLNVGMVATPMLYFAAVNECGGSGVMITGSHNPPDYNGFKMMLGGDTLAGEAIQELLSIIEKDGFAAAGKQGSVTEKDISGEYLKHITGHIRLKRPMNIAIDAGNGVGGAFAGKLYKGLGNKVTELFCDVDGTFPNHHPDPSKPKNLQDLIAALKNGDAEIGLAFDGDADRLGVVTKDGNIIYPDRQLMLFAQDVLNRNPGAKVIFDVKSTRLLAPWIKEHGGKAIMEKTGHSFIKSAMKETGAPVAGEMSGHIFFKERWFGFDDGLYAGARLLEILSASDNPSEVLNNLPQSISTPELNIALPEGSNGHQVIDELAAKAEFEGATEIITIDGLRVEFPDGFGLMRASNTTPILVLRFEADTQEAIERIQNQFKAVIESNPNLIWPL

SEQ ID NO: 1366 - protein, 169 aa, Neisseria
MIILHTNKGDIKIELDFDKAPVTAKNFEQYVKDGFYDGVIFHRVIKGFMIQGGGMDENMNEKETRDPIQNEASNGLPNDKYTIAMARTSDPHSASAQFFINTADNAFLNFRSKELYGKTVVQDWGYAVFGKVVDGFDVVDAIEGVSTKRHGYHDDVPSEPVVIIKAEAV

SEQ ID NO: 1367 - protein, 471 aa, Neisseria
MNLHAKDKTQHPENVELLSAQKPITDFKGLLTTIISAVVCFGIYHILPYSPDANKGIALLIFVAALWFTEAVHITVTALMVPILAVVLGFPDMDIKKAMADFSNPIIYIFFGGFALATALHMQRLDRKIAVSLLRLSRGNMKVAVLMLFLVTAFLSMWISNTATAAMMLPLAMGMLSHLDQEKEHKTYVFLLLGIAYCASIGGLGTLVGSPPNLIAAKALNLDFVGWMKLGLPMMLLILPLMLLSLYVILKPNLNERVEIKAESIPWTLHRVIALLIFLATAAAWIFSSKIKTAFGISNPDTVIALSAAVAVVVFGVAQWKEVARNTDWGVLMLFGGGISLSTLLKTSGASEALGQQVAATFSGAPAFLVILIVAAFIIFLTEFTSNTASAALLVPIFSGIAMQMGLPEQVLVFVIGIGASCAFMLPVATPPNAIVFGTGLIKQREMMNVGILLNILCVVLVALWAYAVLM

SEQ ID NO: 1368 - protein, 69 aa, Neisseria
MHLFPIYPIFPLTYQSHLINKTDKSFTIYLHYIRLQIYSNQLQKRRFHKPFRIARHKRKTDFVALKEYS

SEQ ID NO: 1369 - protein, 120 aa, Neisseria
MNLPRNRFILLSALWFAGSIYSLLFKAAETAPPPFPHFDKVAHLALFFAQIWLLTKAFRTDNRPIPYRSLMVFALCFALFSECAQAWFTATRTGSLGDVLADLTGAALALFTARAACRPD

SEQ ID NO: 1370 - protein, 192 aa, Neisseria
MSNTIKMVVGLGNPGKEYEQTRHNAGFWFLDELAWKWKASFKEEKKFFGEVARAALPDGDVWLLKPATFMNRSGQAVAALAQFYKIKPEEILVVHDELDIPCGRIKFKLGGGNGGHNGLKDIQAKLGTADYYRLRLGIGHPGDRNLVVGYVLNKPSTEHRRQIDDAVAKSLQAIPDILAGKWEEATRFLHSK

SEQ ID NO: 1371 - protein, 92 aa, Neisseria
MLEIEIVYGLPDRQVLKTMQLAEGTTVRAAALQSGLDGIFEDLNLHSAPLGIFGKAVKDDTPLRDGDRIEVYRPLLIDPKEARRKRVQNQEE

SEQ ID NO: 1372 - protein, 145 aa, Neisseria
MPVKKVEKNILVLHGADKMFELVDKVEDYPHFLPWYSKTEVIGRSGNELKARLFMDYMHVRQSFATHNRNIPGREIRMELLEGPFKTLRGTWKFIDLGDDMCKIEFNLEYDFSNAVLSALISPVFNHLSTTLVEAFVKEADRRYA

SEQ ID NO: 1373 - protein, 655 aa, Neisseria
MGNTFKSILVWVALGIGLMAAFNALDGKKEDNGQIEYSQFIQQVNNGEVSGVNIEGSVVSGYLIKGERTDKSTFFTNAPLDDNLIKTLLDKNVRVKVTPEEKPSALAALFYSLLPVLLLIGAWFYFMRMQTGGGGKGGAFSFGKSRARLLDKDANKVTFADVAGCDEAKEEVQEIVDYLKAPNRYQSLGGRVPRGILLAGSPGTGKTLLAKAIAGEAGVPFFSISGSDFVEMFVGVGASRVRDMFEQAKKNAPCIIFIDEIDAVGRQRGAGLGGGNDEREQTLNQLLVEMDGFESNQTVIVIAATNRPDVLDPALQRPGRFDRQVVVPLPDIRGREQILNVHSKKVPLDESVDLLSLARGTPGFSGADLANLVNEAALFAGRRNKVKVDQSDFEDAKDKIYMGPERRSMVMHEDEKRATAYHESGHAIVAESLPFTDPVHKVTIMPRGRALGLTWQLPERDRISMYKDQMLSQLSILFGGRIAEDIFVGRISTGASNDFERATQMAREMVTRYGMSDKMGVMVYAENEGEVFLGRSVTRSQNISEKTQQDIDAEIRRILDEQYQVAYKILDENRDKMETMCKALMEWETIDRDQVLEIMAGKQPSPPKDYSHNLRENADAAEDNAPHAPTREETEAPAPADTASTESEQQPENKA

SEQ ID NO: 1374 - protein, 206 aa, Neisseria
MAVRSKSSKAWLHEHVNDHYVHMAQKDGYRARAAYKLLEINEKDKLIKPGTVLADLGSAPGSWSQVAAKLTGTSGAVFALDILPMEAIGGVSFIQGDFRENDVLAQFETLLDNRPLDLVICDMAPNMSGNAVSDQARSFYLCELALDFASQHLKTGGSFLVKVFQGAGYQEYMAAMREIFGTVQTRKPEASRNRSSEIYLLGKNKR

SEQ ID NO: 1375 - protein, 94 aa, Neisseria
MTDTKLNTKEILELKARAHHLHPVVMVGQQGLTDAVIKETDAALTAHELIKVRVFGDDRAERIEICTALCEAVDAQLVQHIGKLLVLWRKNIEA

SEQ ID NO: 1376 - protein, 333 aa, Neisseria
MQFPYRNVPASRMRRMRRDDFSRRLMREHTLTADDLIYPVFVLEGSAREEDVPSMPGVKRQSLDRLLFTAEEAVKLGIPMLALFPVVTANKTERAQEAYNPEGLVPSTVRALRERFPELGIMTDVALDPYTVHGQDGLTDENGYVMNDETVEVLVKQALCHAEAGAQVVAPSDMMDGRIGAIREALEDAGHIHTRIMAYSAKYASAFYGPFRDAVGSSGNLGKADKKTYQMDPANTDEALHEVALDIQEGADMVMVKPGLPYLDVVRRVKDEFGVPTYAYQVSGEYAMLQAAIANGWLDGGKVVLESLLAFKRAGADGILTYYAIEAAKMLKR

SEQ ID NO: 1377 - protein, 385 aa, Neisseria
MKFATKAIHSSYDCDEHNRALMPPIYQNSMFALHEIGENVPYRYSRLSNPTRQILEDTVADLEHGAAGFAFSSGMAGIDAVWRTFLRPGDTIVAVADIYGGAYDLLVDVYQKWGVNVVFADLGNPDNLDELLKAHKVKLVWLETPSNPLLRLVDIKVLAAKAKAAGALVGIDNTFATPYLQQPLDMGCDFVFHSATKYLCGHSDVLMGIVVAKTKELAQPLHDMMVHTGAVAGPLDCWLVLRGIKTLALRMNAHCQNALEIARRLEAHPAIEKVFHPGLPSHEHYELAKTQMPKGIGGVVTVYLKNDTREAANSVIKNMKLVKMASSLGGVESLVNHCYSQSHSGVPHDVKMEMGIKVGLLRFSIGIEDADDIWNDISAALDTTL

SEQ ID NO: 1378 - protein, 257 aa, Neisseria
MNTIADVQSSRDLRNLPINQVGIKDLRFPITLQTAEGIQSTIARLTMTVYLPAEQKGTHMSRFVALMEQHAEALDFAQLRKLTTEMVALLDSRAGKISVSFPFFRKKTAPVSGIRSLLDYDVCLTGEIKDGAYGHSMKVMIPVTSLCPCSKEISQYGAHNQRSHVTVSLTADAEVGIEEVIDYVEAQASCQLYGLLKRPDEKYVTEKAYENPKFVEDMVRDVATSLIADKRIKSFVVESENFESIHNHSAYAYIAYP

SEQ ID NO: 1379 - protein, 221 aa, Neisseria
MTVLSKEQVLSAFKNRKSCRHYDAARKISAEDFQFILELGRLSPSSVGSEPWQFIVVQNPEIRQAIKPFSWGMADALDTASHLVVFLAKKNARSDSPFMLESLKRRGVTEPDAVAKSLARYQAFQADDIKILDDSRALFDWCCRQTYIALANMMTGAAMAGIDSCPVEGFNYAEMERILSGQFGLFDAAEWGVSVAATFGYRVQEIATKARRPLEETVIWA

SEQ ID NO: 1380 - protein, 321 aa, Neisseria
MSHTQLTQGERYHIQYLSRHCTVTEIAKQLNRHKSTISREIRRHRTQGQQYSAEKAQRQSRTIKQRKRQPYKLDSQLIQHIDPLIRRKLSPEQVCAYLCKHHQITLHHSTIYRYLRQDKSNGSTLWQHLRICSKPYRKRYGSTWTRGKVPNRVGIENRPAIVDQKSRIGDWEADTIVGKGQKSALLTLVERVTRYTIICKLDSLKAEDTARAAVRALKAHKDRVHTITMDNGKEFYQHTKITKALKAETYFCRPYHSWEKGLNENTNGLIRQYFPKQTDFRNISDREIRRVQDELNHRPRKTLGYETPSVLFLNLFQPLIH

SEQ ID NO: 1381 - protein, 252 aa, Neisseria
MNPKISSDHTEDAVRLSKRMAQLGLCSRREADGYIEQGWVTVNGKTAVLGQKVSPADRIELNKKAHEQQAARITILLNKPVGYVSAQAEKGYKSAAELITPENHWEGDTGRIRFDPKHKIGLAPAGRLDIDSVGLLVLTQDGRIAKQLIGENSGSEKEYLVRVRGKLDEKGLALLNHGLSLDGEKLRPAQVEWQNEDQLRFVLKQGKKRQIRRMCELVGLRVVGLKRIRMGKVKLGRLPPGKWRYLAPGESF

SEQ ID NO: 1382 - protein, 296 aa, Neisseria
MNSPFHNIGIVTRPNTPDIQDTAHTLITFLKQHGFTVYLDEVGIKEGCIYTQDTVGCHIVNKTELGQYCDLVAVLGGDGTFLSVAREIALRAVPIIGINQGHLGFLTQIPREYMTDKLLPVLEGKYLAEERILIEAALIREGKTAERAIALNDAVLSRGGAGQMIEFEVFVNREFVYTQRSDGLIVSTPTGSTAYSLAAGGPIMQAGLHAFTLVPICPQSMTNRPIAIPDTSEIEILVTQGGDARVHFDGQTHIDVQNLDRITIRRYRNPLRILHPTDYQYFKTLRQKLHWGEQLV

SEQ ID NO: 1383 - protein, 188 aa, Neisseria
MSALLPIINRLILQSPDSRSELAAFAGKTLTLNIAGLKLAGRITEDGLLSAGNGFADTEITFRNSAVQKILQGGEPGAGDIGLEGDLILGIAVLSLLGSLRSRASDELARIFGTQADIGSRAADIGHGIKQIGRNIAEQIGGFSRESESANIGNEALADCLDEISRLRDGVERLNERLDRLERDIWID

SEQ ID NO: 1384 - protein, 265 aa, Neisseria
MRAVPPPHISITGLGYLGLPLAQKFYQHGSRVAAVKRSLTSDDINLPIHLDTIDLNQDSAFQSANLARDTSFWRHHANKPVWFCLLPPSSLTHYADTVKQWAELARACNVQHLIFTSSTSVYGDTARECDEIALPDPQTESARQILAAEQHLLDSGVPNIDILRLGGLYCAERHPVGRLVQKQNIPGGNRPINIVHRNIAVESLFQTAFNPGGRRLKNIIEPRHPTRREFYTEEAAKLGLPAPDFAPDDSVGKIIRTVCDNGLSL

SEQ ID NO: 1385 - protein, 216 aa, Neisseria
MPVTRPAKINTYTRIIDASLALFNEEGERNISTNHIAAHLGISPGNLYYHFRNKDEIIVQLFKRYSEALLAYLNEAVLPSDVEDSINYMAGIYDVMWEYRFLFSDVNTLLARSAELLGEHNTFTQAKVSPLLVNLLTQLNGLNIIQADQTAMNDLAVNMWMVTKYWFDFDSSLRGRTKLTEDSKARGIRRTLSLLRPYLLPEHRKKYDRKIGNGNP

SEQ ID NO: 1386 - protein, 346 aa, Neisseria
MQPIRYRTDLTPYNTFGLRAQARAFIALEHADELRDIVRLLEFDRDTVLWLGGGSNILLMQDYAGLVVHMENKGIREIARSDGMVLIEAQAGEIWHDFVLHTVALGLSGLENLSLIPGTVGASPVQNIGAYGVEAKDVIHSVRCFDLDTETFVELANADCRFAYRESLFKQEGKGRYVIVSVVFALKTHFVPTLGYGDLAAAVAELSAGRVPTAKDVSDAVCAIRNSKLPNPNVLGNVGSFFKNPVVSAEKAATLLQRHPDMPRYPQPDGSVKLAAGWLIDQCRLKGFQIGGAAVHDRQALVLVNKNNASANDVRQLAQHIKFTVFARFQVELHAEPNWLPASFSL

SEQ ID NO: 1387 - protein, 459 aa, Neisseria
MLLDLNRFSFPVFLKEVRLLTTLALPMLLAQVAQVGIGFVDTVMAGGAGKEDLAAVALGSSAFATVYITFMGIMAALNPMIAQLYGAGKTDEVGETGRQGIWFGLFLGVFGMVLMWAAITPFRNWLTLSDYVEGTMAQYMLFTSLAMPAAMVHRALHAYTSSLNRPRLIMLVSFAAFVLNVPLNYIFVYGKFGMPALGGAGCGLATMAVFWFSALALWIYIAKENFFRPFGLTAKFGKPDWAVFKQIWKIGAPIGLSYFLEASAFSFIVFLIAPFGEDYVAAQQVGISLSGILYMIPQSVGSAGTVRIGFSLGRREFSRARYISGVSLVLGWMLAVITVLSLVLFRSPLVSMYNNDPAVLSIAATVLLFAGLFQPADFTQCIASYALRGYKVTKVPMFIHAAAFWGCGLLPGYLLAYRFNMGIYGFWTALIASLTIAAIALVWCLELCSREMVRSHKAV

SEQ ID NO: 1388 - protein, 62 aa, Neisseria
MRNNGAHYIVKKCRAVRRRIQGIKVYSDCVYFMVKFGFNDLTALSRRTGAVRILNRKEAPPF

SEQ ID NO: 1389 - protein, 383 aa, Neisseria
MQTWQLPEHIADVLPTNARQLESAREQLLALFRVHGYELVQPPLMEYAHSLLTHIDAGLSLKTILVTDRLSGRQLGIRADITPQVARIDAHLLSANQGINRLCYAGPVLHAQPDGLLNMREPLQAGAEMYGFADIRGDIELIDLMLKSMKIADMGKVLLSLGHIGIFRALSDAAHLDAGQSATLLALMQDKDTGAVEAQVKAWKLDGMWAKAFSLLPRLYGGREVLSDARGRLPDLSAVGGALGELQAVCDAFPDCEIHIDLSELRVDNYHTGLLYAAYAADFHDAVARGGRYDGLGGYFGRARPATGFSFDLRSFIGRLPAIERQPAVLVDAEDAEAAHEAVEALREQGQCVVIDYGIGHNVSEELAGRLKKTDGVWQVVKR

SEQ ID NO: 1390 - protein, 434 aa, Neisseria
MAMAKNVVVIGAQWGDEGKGKIVDWLAEEAGGVVRFQGGHNAGHTLVVGGKKTILRLIPSGILHESLDCFIGSGVVVSPEALLGEIDELNAAGVKNVEGRLKIAPTCPLILPYHIALDQAREASRGKGKIGTTGRGIGPAYEDKVARRAIRAADLLHPEKLREKLDAVLAYYNVQLQHLHNAEPVKAEDVMAVIEKVAPRIAPMITDVSRVLNEKNKNGEKLLFEGAQGALLDIDYGTYPFVTSSNCLAGAASAGAGVGPQMLDYVLGIVKAYTTRVGSGPFPTELFDEVGVGLAERGHEFGSVTGRARRCGWFDAAALKRSIQINGISGMCITKLDVMDGVETINICVGYELPDGGKTDILPCGSDAVETCKPIYETMPGWRESTFGVKDYGALPENAKAYLKRIEEVCGAPVAIVSTGPDREETIVLHHPFA

SEQ ID NO: 1391 - protein, 104 aa, Neisseria
MCVLLHRRLSHAGDESVYVAQSPLAASEGRGARERGGQVLSHWLSPYYLSNYGCIMRLCLFFVKHYTVKMCKYLVRTYTLFFTFSSIGYQCVQRKFENFYILVV

SEQ ID NO: 1392 - protein, 127 aa, Neisseria
MPKSLSLQDVQLRFSSKFPDKTVLKFTKNYEPVTIQCPLHGSVVYGNLQAAMKSSTGCPECTRNPEKPSPNAVAIRLEDTETGEIYEFASTLAASKFIGCSNSTLAVRLSGRTPFDRLIRYRYRLVK

SEQ ID NO: 1393 - protein, 136 aa, Neisseria
MALTFTQAVSKLTSKFPHLNLVEFNGVRYPTVIVCPIHGRVTCSTFKSMLDSKSGCPKCASYGVNSHKIPEDTIDKLSKNTVLEDTVTGETLTFPSRASAARSLGINPAAITDRIKGRVHTETLLAGRYKVHICTK

SEQ ID NO: 1394 - protein, 130 aa, Neisseria
MAKSFNQAASELTDIFPNISLTGFDGVNYPVTVNCPMHGNVRYSTFNALIKSKYGCPECAKMSKTQTPPNVGKPLLILDTTTNETLTFPSVTAAGAALGVHFQQINHRLKGRTSPDNLISNRYKVLGYDR

SEQ ID NO: 1395 - protein, 130 aa, Neisseria
MGKRMTFDTAKSRFQEKFPHLELLEFSGIYKPSSVRCPTHGVVQLLYYDTAIKSKYGCPECGKLKMKENTPPQNQKPVSILDTATGETLTFPSVQAAAKALNTPYGSIRTKLDGRSNPDNLVCNRYKVLL

SEQ ID NO: 1396 - protein, 186 aa, Neisseria
MTANFAQTLVEIQDSLYRVVSTVQYGDDNLKRLTADKRKQYELNFKISEGSTRVESDFKETLVRFGRDMLQDMPPKIRSATLVALTTLLVGGALGYGYLEYLKQVASEGYQTERLYNAVDRLAESQERITSAILKGARGADFVQIGRRSYSREDISEANRRAERVPYGAELVSDGNFTAVLSDIGD

SEQ ID NO: 1397 - protein, 347 aa, Neisseria
MKCVYWNQTDGLRFYTAWHNSSKTNCTNCHLQANVLHTFAESDIHKPATFWDNPPKFQNITPYQKGTSVKRIFLFLATNIAVLVVINIVLAVLGINSRGGTGSLLAYSAVVGFTGSIISLLMSKFIAKQSVGAEVIDTPRTEEEAWLLNTVEAQARQWNLKTPEVAIYHSPEPNAFATGASRNSSLIAVSTGLLDHMTRDEVEAVLAHEMAHVGNGDMVTLTLIQGVVNTFVVFLSRIIANLIARNNDGSQSQGTYFLVSMVFQILFGFLASLIVMWFSRQREYRADAGAAKLVGAPKMISALQRLKGNPVDLPEEMNAMGIAGDTRDSLLSTHPSLDNRIARLKSL

SEQ ID NO: 1398 - protein, 215 aa, Neisseria
MKALLLGAPGAGKGTQAQFITAAFGIPQISTGDMLRAAIKAGTPLGLEAKKIIDEGGLVRDDIIIGMVKERIAQDDCKNGFLFDGFPRTLAQAEAMVEAGVDLDAVVEIDVPDSVIVDRMSGRRVHLASGRTYHVTYNPPKVEGKDDVTGEDLIQRDDDKEETVKKRLAVYHEQTEVLVDFYSKLEGEHAPKYIKVDGTQAVEAVKAEVLGALGK

SEQ ID NO: 1399 - protein, 246 aa, Neisseria
MNPLISDFQTPQQRTPVIVALDFSNEKDTLGFVRNLDPTLCQIKIGKELFTATGRNLAESLINQGFKLFLDLKYHDIPHTVAQACKVAADMGVWMVDMHASGGRRMMEAAAEAVAGYGTKPLLIGVTVLTSMEQSDLAEIGLNTAPEEQVIRLAKLAQSSGLDGVVCSAQEAAPLRRELGQDFVLVTPGIRLDVAGNNDDQRRIMTPAEALAAGSTYLVMGRPVTQAADPVAVLREVNRVANLEAN

SEQ ID NO: 1400 - protein, 323 aa, Neisseria
MSAKFQQETLKSRFAQAKVLVVGDVMLDRYWFGDVSRISPEAPVPVAKIGRIDQRAGGAANVARNIASLGGRAGLLSVTGNDEAADALDALMVQDGVASYLMRDKQIATTVKLRVVARNQQLIRLDFEEHPNCEVLEQIKQKYREILPEYDAIIFSDYGKGGLSHISDMIDWAKHAGKTVLIDPKGDDYEKYVGATLITPNRAELKEVVGSWKNESELTEKAQNLRRHLDLTAVLLTRSEEGMTLFSEGEPIYQPTRAQEVYDVSGAGDTVIAGMGLGLAAGCTMPEAMYLANTAAGVVVAKLGTAVCSFAELIKALSGQSTM

SEQ ID NO: 1401 - protein, 411 aa, Neisseria
MTISTMAQTHDTRLQKTLLFPSQQGWKSKTFLKPDSHIRLATVFSGIGAVEQAFHRLNLNHTIVFSGDIDPYVKKSYLGNYKLNEDFWHNDITQFDARKFRNQVDILVGGSPCQAFSMVGKRAGLEDTRGTLFYEFARVVDEVQPKIFIYENVKGLLNHDNGKTWKVVKSVFYSLGYDLYFQIMNSKDYGIPQHRERIFVVGFHTPPINGFQFPEKIELEHTMQDFLEDYTDSKYFLREKGAKFVTSSKNRQKRYTQINGEIALCQKANQQFNWHGDFIFQAARESEFDDFIFDVNNVEEKYYLSEKIKNYVLAGGTKNFKTSTETDLPVARPLLQTMHKMHRAGVDNYVTHNRGRIRKLTPRECLRLMGFRDDFKILVSDTQMYRQAGNSIVVDVLIAILKQMDITLYGE

SEQ ID NO: 1402 - protein, 334 aa, Neisseria
MTIIVTGAAGFIGSNIVKALNQRGITDIVAVDNLSKGEKFKNLAECEIAHYLDKHEFIRQVREHILPYQNIEAVFHQGACSDTMNHDGLYMMDNNYQYTLDLLDWCQDERIPFLYASSAAVYGKGEIFREERELEKPLNVYGYSKFLFDQVLRRRMKEGLTAQVVGFRYFNVYGQHEQHKGRMASVAFHHFHQYREHGYVNLFGSNDGYGNGEQTRDFVSVEDVAKVNLYFFDHPELSGIYNLGTGRSQQFNELAAATVNACRAAEGKPEMSLKELVEEELIRYIPFPDALKGKYQSFTQADITKLREAGYKEEFFDVKSGVDRYVKWMLENLA

SEQ ID NO: 1403 - protein, 514 aa, Neisseria
MMTEMQQRAQLHRQIWKIADEVRGAVDGWDFKQYVLGTLFYRFISENFTDYMQAGDSSIDYAAMPDSIITPEIKDDAVKVKGYFIYPGQLFCNIAAEAHQNEELNTKLKEIFTAIESSASGYPSEQDIKGLFDDFDTTSSRLGSTVADKNKRLAAVLKGVAELDFGNFENHHIDLFGDAYEYLISNYAANAGKSGGEFFTPQSVSKLIARLAVHGQEKVNKIYDPACGSGSLLLQAKKQFDEHIIEEGFFGQEINHTTYNLARMNMFLHNVNYNQFHIELGDTLTNPKLKDSKPFDAIVSNPPYSINWIGSDDPTLINDDRFAPAGVLAPKSKADFAFILHALNYLSGRGRAAIVSFPGIFYRGGAEQKIRQYLVEGNYVETVIALAPNLFYGTGIAVNILVLSKHKDNTDIQFIDASGFFKKETNNNVLIEEHIAEIVKLFADKADVPHIAQNAAQQTVKDNGYNLAVSSYVEAEDTREIIDIKQLNAEIGETVAKIERLRREIDEVIAEIEA

SEQ ID NO: 1404 - protein, 336 aa, Neisseria
MSIILYTANDGTAQFALQEFGGQLWLTQADMAELYQTTKQNISKHIKTILAEQELEEKATVNFQLTVQNENGRKVNRKIAHYSLPMIIAVGYRVRSARGIQFRQWATERLDEYLTKGFAIDDERLKGTGGGDYWKELLNRIRDIRSSEKALYRQVLDLYATSQDYNPKSSESQTFFAAVQNKLHYAASRQTAAELIYSRADSSKDFMGLTTFQGAIPTLNEAKIAKNYLTEDELFRLNRLVSAFFDLAEIKAQEQSPMYMRDWIAELDKFSGLYGQGTLQGAGSISRKQAEQKAEREYRAYEARILSPVEQAYLESVKALEKTAVQQIKQKKDRTK

SEQ ID NO: 1405 - protein, 380 aa, Neisseria
MGKSLTEIAEELKGNDKKVQLIYAFNGTGKTRLSREFKNLIAPTSSEEPDGEPTRRKFLYYNAFTEDLFFWDNDLLANEAPRLKIQKNSFTDWLLRDNGLDGAVIKNFQYYTDDKLTPDFNDDFSEIAFYFARGNDEQIENIKISKGEESNFIWSIFYVLIRQVIAELNIPEDSEEGRSTDQFDDLEYIFIDDPVSSLDENHLIQQAVDLADLIKLSKPRLKFIITTHNVLFYNVLYNELKKLEKEKKSYLLLKNEDGSFDILEKQGDSNKSFSYHLHLKGVIEKAIENQQVERFHFMLLRNLYEKTANFLGYKQRSDILPEDSRRNYFQRIINFTSHSTLSNEAFAEPTPQEQETVKLLLQHLLDNYNFFQDDEQRDKP

SEQ ID NO: 1406 - protein, 128 aa, Neisseria
MNLETKPIAETPNFIVLDQYEKIEQSGSYQSENRLEAELIADLQNQGYEYRKDLNSQSRLLENLRAQLQRLNDVAFSDGEWARFLTEYLDRPSENITDKTRKIHDDHIYDFAFDDGPWIRISSATLVY

SEQ ID NO: 1407 - protein, 321 aa, Neisseria
MSYTQLTQGERYHIQYLSRHCTVTEIAKQLNRHKSTISREIRRHRTQGQQYSAEKAQRQSRTIKQRKRQPYKLDSQLIQHIDTLIRRKLSPEQVCAYLCKHHQITLHHSTIYRYLRQDKSNGSTLWQHLRICSKPYRKRYGSTWTRGKVPNRVGIENRPAIVDQKSRIGDWEADTIVGKGQKSALLTLVERVTRYTIICKLDSLKAEDTARAAVRALKAHKDRVHTITMDNGKEFYQHTKITKALKAETYFCRPYHSWEKGLNENTNGLIRQYFPKQTDFRNISDREIRRVQDELNHRPRKTLGYETPSVLFLNLFQPLIH

SEQ ID NO: 1408 - protein, 921 aa, Neisseria
MRIRRRLKNIYLLDKKNLARNHVQVINQFEQTGTHANRYDVTVLVNGLPLVQIELKKRGVAVREAFNQVHRYSKESFNSENSLFKFLQIFVISNGTDTRYFANTTKRDKNSFDFTMNWARSDNHPIKDLKDFTATFLQKSVLLGVLLHYSVFDANDTLLIMRPYQIAAAERILWKINSSAQAKNWSKPESGGYVWHTTGSGKTLTSFKAARLATESAFIDKVFFVVDRKDLDYQTMKEYQRFSPDSVNGSESTAGLKRNLEKDDNKIIVTTIQKLNNLMKGEDNLPVYHQRVVFIFDECHRSQFGEAQKNLKKKFKKFCQFGFTGTPIFPENALGAETTAGVFGRELHSYVITDAIRDEKVLKFKVDYNDVRPQFKAVEAEQDEKKLSAAENHKALLHPERIREITQYILNQFRQKTHRLNAGGKGFNAMFAVSSVDAAKCYYEAFKTQQAGSLHPLKVATIFSFAANEEQNAVGEIVDETFEPEAMDSSAKEFLQAAINDYNACFKTNFGTDSKAFQNYYRDLAKRVKNQEIDLLIVVGMFLTGFDAPTLNTLFVDKNLRYHGLMQAFSRTNRIYDATKTFGNIVCFRDLEQATIDAITLFGDKNTKNVVLEKSYEEYMNGYTDSQTGEARRGYLDVAKELRERFPDPDKIETEKDKKDFAKLFGEYLRAENVLQNYDEFAALRELQSVDAADEDAMKAFQEKYYLSDEDVQEMRQVPMPSERAVQDYRSAYNDIRDWLRRQKAGEQKEQSKIDWDDVVFEVDLLKSQEINLDYILQLVFEHHKKIKGKAELVEEIRRIIRASIGHRAKEGLIVDFINDTDLDKVPDVPAILETFYTYAQEVMRHEAAGLIAAEGLNETAAKRYLISSLKRGYASENGTELTETLPKMSPLNPQYLTKKQSVFQKIAAFVEKFAGIGTDI

SEQ ID NO: 1409 - protein, 769 aa, Neisseria
MLAPELEQILQQLYREARKAHYEFISLEHLLLVLIEEDASVHNVLKLCGADLKVVSEQLAASVAENTPLIPEHLLDTVETRPTLGFQRVMQRAMVHTQSAGKAAVEPLDVLVALMSETDSHTVYFLKLQSVTRFEVLRCIAHGSPDEDEDEDEDEDDGNYSSDGMDDDNGNRTKPGKNPLSAYTVNLNAEVKAGRIDPLIGRKHEMERLVQILCRRRKNNPLLVGEAGVGKTALAEGLAHQIVNGGIPDALKDAEVYALDMGSLLAGTKYRGDFEARVKSVLKQLEKIPHAILFIDEIHTIIGAGSTSGGTMDASNLLKPALAKGSLRCIGATTYDEYRTIFDKDHALSRRFQKIDVVEPTVSETVQILRGLKPMFEAFHQVRYTQGALEAAAELSARYINERFLPDKAIDVMDEAGAEQRILPKSKQKKVIGKAQIETVIAKVARIPEKTVSHDDKQVLQFLGRDLKNMVYGQENAIDALVAAVKMSRSGLALPDKPIGSFLFSGPTGVGKTEVAKQLAYSMGVPLQRFDMSEYMERHAVSRLIGAPPGYVGFEQGGLLTEAINKQPHCVLLLDEIEKAHPDIFNVLLQVMDAGKLTDNNGKSADFRNVILIMTTNAGAESLSRPSLGFTAKRERGDEMQAINKLFTPEFRNRLDAIIPFAPLSEPVITKVVDKFLLQLEHRLLDKKVEAEFTSALHKYLAEKGFDPQMGARPMHRLIQEKIRKPLADELLFGKLSDGGFVRIDWDAAKEEAVLKFKKSKVKIKTASA

SEQ ID NO: 1410 - protein, 100 aa, Neisseria
MTAQHQSDTLLHRLNTLPPKRYGVFLLNDDYTTMEFVVEILTEIFMLGQEQAVAVMLLVHHEGKGLCGTYTRDIAQTKQQQVMQRAKAEGHPLQCIVEEI

SEQ ID NO: 1411 - protein, 67 aa, Neisseria
MATGIVKWFNDAKGFGFITPDEGGEDLFAHFSAINMEGFKTLKEGQRVSFDVTTGPKGKQAANIQAA

SEQ ID NO: 1412 - protein, 443 aa, Neisseria
MLFNHTASELLDLCRRTLDLAKATGATAAEADFSESLGQSVSVRLGEIEQIEFQQDKSLDITVYVGKRKGRASTADFSEKALQDTVKAAIDIARHTAEDGCAGLADACLMAKHIGDPDLYHEWDLDTEAAVGLAKQCEQAALNEDERIENSEGAAVQTGHYQYVYGNTHGFAAHRQGTHHSISCSVVAADENGMQRDYWYDSACRHPDMDSPETIGQTAARRTLRRLGSRSIPTGSYPVLFDTTVSGGLIGHLVGALSGGALYRQSSFLIDSIGKKVLPDFLNLREEPHIPRSFRSSYFDAEGVATAPRFVIQNGIVEGYFLSSYSARKLGMQTTGNAGGAHNLYLNHTHETQSDLLKEMGTGLLVTELMGQGANTITGDYSRGAAGFWVENGVIAYPVHEITVAGRLQDMYRDIVGVADDALRRSSNKIGSILIAGMTVAGS

SEQ ID NO: 1413 - protein, 178 aa, Neisseria
MRYWKNSRIKMFEQEDEWISKTQMKKQMNDLQDLGMALTKLSNDTLKKIGLDADLYEAVTAYKKITSNGALKRQAQFIGRLMRDTDPAPIEAFLAKLRGDDAAHNAFLQRVEQARVRLLADDGALTQFMSDFPHADAGKLRTLIRNTKKEQEQNKPPKNFRALFQELKTVMENGDAEI

SEQ ID NO: 1414 - protein, 238 aa, Neisseria; identical to SEQ ID NO: 79

SEQ ID NO: 1415 - protein, 566 aa, Neisseria
MSVKIQTRSVNTDVFNHLLTAGADPLIAQLCASRGVQSPAELDDKLASLLPYQSLTNCEAAARRLADAVGRKEKILIVADYDADGATACAVGMSGLAAMGAKVDFLVPNRFEHGYGLTPELAEIAAAQGVDLLITVDNGIASIAGVARAQALGLDVIVTDHHLPAETVPDCIIVNPNQKGCGFPSKSLAGVGVIFYVLMALRAELRRRNYFSDGIKEPNLGELLDLVALGTVADVVPLDHNNRILVSQGLKRMRSGKMRPGIRALFEVARRDWRKAQPFDMGFALGPRINAAGRLDDMSVGIACLLARDDSEAQELAAQLNNLNIERREIEQSMLQDALNDFPETLPSGQMTLVAYRDDFHQGVVGIVASRLKDRFYRPTIVFAPADNGEVRGSGRSIPNLHLRDALDLVSKRHPDLILKFGGHAMAAGLSILEHNIPAFQTTFEEAVREMVCEDDLSQTFITDGSLPACDITLEQAQNLARHVWGQGFAPPSFTDEFHVVRQQPLGAEGKHKKVWLQKDGCEFEAMFWRCSEDIPEYIRTVYRPVANEWRNNLELQLYIDYWEAA

SEQ ID NO: 1416 - protein, 453 aa, Neisseria
MLKKWLNKMLPSGRSSKKAESKTVIPAERHNIRAEMLSFAAENVIRRLKGTGFQAYVVGGAVRDLLLGIEPKDFDVATDATPEQVHKLFRRSRIIGRRFQIVHVMNGAETIEVTTFRGGAKVHQNARGRIMKDNTYGSIEEDAMRRDFTCNALYYDPEKEEILDFHNGIADVAAHRLVMIGDAAERYQEDPVRILRAIRLSGKLGFELSEETAAPIAESICRLKHEPVARLFDEIMKLLFSGHARECLKRLNGFDIPDDIHLLLNALRVSDGIAGKMTVLALKNTDERLRADKSVSVGFVLAALMWPELERHWKSNLQQGLKPAPALSDAINTMRETVERGWGVPQRFSATMREIWMFQPQFENRKGARPHKLFAQARFRAAYDFLLLRAETGNADRALAEWWTAFQTASTEQRSEMTKNEAAARHEKNEGQAKKRRRRRRKPKPKVVGTDWE

SEQ ID NO: 1417 - protein, 107 aa, Neisseria
MKKCILGILTACAAMPAFADRIGDLEARLAQLEHRVAVLESGGNTVKIDLFGSNSTMYVCSVTPFQKTFEASDRNEGVARQKVRQACNRETSAMFCEDEAIRCRKFD

SEQ ID NO: 1418 - protein, 317 aa, Neisseria
MTHTVHLHLEETDNLALQRLCGSFDNNLDLLAKALDIHISRRFEHFTFNGAFAHAGKRALLKLLETAQTRDLNDGDIRLAAVEAQTEDAGHQEKNHDHAYYFRTKRGSIGGRTPRQNGYIRALLNHDIVFGLGPAGTGKTYLAVAAAVDAMEKHQVERIILVRPAVEAGEKLGFLPGDLTQKVDPYLRPLYDALYDLMGFDRVTKLIEKGLIEIAPLAYMRGRTLNGAYIILDEAQNTTPEQMKMFLTRIGFGAKAVITGDTSQIDLPKNIKSGLKDAREKLHNVEGLYFHTFTGEDVVRHPLVQKIVEAYESAEHD

SEQ ID NO: 1419 - protein, 344 aa, Neisseria
MARHVFLPPLSVHRHRPHPLGVCGFESFQTLHPRKRAARPDSRPLYELCRHTCLQDFPKIRHPLCRHGTQQHHYARFGAPAPMAAYEKCGGTRRRTSRRQPPFRTRPATQIRLRMAVPPPTYWAEYSTDRLNKEKKNNKPHFVFCTVSHLRRLKGHDVLLTAFARALAQCPQLRLNIGGSGQEEQRLKQQAADLGITHAVTFLGALQPEAVLDLMRNSDAFVLASRTETFGVVYIEALSQGLPVIATRCGGAESIVSDGNGYLVPVDDDDALADALIKMCEHHSDFEPARLRENCLNEFGENAVIGRLIGIFRQAIAEYGKKIPVKYSGLTKIRTRRRSRRQYK

SEQ ID NO: 1420 - protein, 57 aa, Neisseria
MPEPLHVLVIPSWYPQSEQDVDGIFFKIRHWHCRGKASKPPCLHRCSATCGKKQQAS

SEQ ID NO: 1421 - protein, 234 aa, Neisseria
MLRLVLAASLSAVSFPAAAEALNYNIVEFSESAGVEVAQDTMSARFQVTAEGRDKNAVNAEFVKKFNKFIRKSKNGSFKTELVSRSAMPRYQYTNGRRIQTGWEERAEFKVEGRDFDELNRFIADIQADAALEYTDFHVSRERRNEVIDQVSKDAVLRFKARAEKLAGVLGASGYKIVKLNLGHIGSHIAGGGAAQAKMLRAMPMAASVNMEGADSAAPGVEEISISVNGTVQF

SEQ ID NO: 1422 - protein, 188 aa, Neisseria
MSIKSDKWIRRMSEEFGMIDPFEPNQIKEADGKRIISYGTSSYGYDIRCANEFKIFTNINSTIVDPKNFDPKNFVTVEDDCCIIPPNSFALARTVEYFRIPRNVLTVCLGKSTYARCGIIVNVTPFEPEWEGYVTLEFSNTTPLPAKIYAGEGVAQVLFFESDEICETSYKDRNGKYMGQTGVTLPKA

SEQ ID NO: 1423 - protein, 138 aa, Neisseria
MLKHLAFLLPAMMFALPTSAAVLTSYQEPGCTYDGNVGKDGKPAGKGTWRCQDGRNYTGSFKNGKFDGQGVYTVAANREIFIEPFNSDSTKFRNMVLSGTFKKGLAHGRFTVSQNGETLFIMKCENGMIKEVKLPKNK

SEQ ID NO: 1424 - protein, 299 aa, Neisseria
MWFKQISFYPLNKEKLPEADVLADKLAEAEFTHCQGLDWFSEGFTAPVSFSPELVFPADFTLRVALKKEEKVLPAGVIRDILEEKVAEIQNNEARNVGRKEKQELKEQITDDLLPRAFTRSSRTEAVFNTRHGYLLVNNAASAKAENILTKLREALGGLEASLPNTKQSPSSLMTGWLLQGHCEGGFELDSDCELKGTGDIVPVVKVSKQDLTADEVVQHVKNGKTVTQLGLVWREQIAFILTQDFTLKRIQYLDVLQEEAESNGDDAAGLAFASQILMAESVSTMLEELVSYLGGWQD

SEQ ID NO: 1425 - protein, 485 aa, Neisseria
MKPTIALVGRPNVGKSTLFNRLTRTKDALVHDLPGLTRDRHYGHGKVGSKPYLVIDTGGFEPVVDSGILHEMAKQTLQAVDEADAVVFLVDGRTGLTPQDKIIADRLRQSPRPVYLAVNKGEGGNRAVLAAEFYELALGDPYVISGAHGDGVYYLIEDILEKFPEPEAEEADARHPVFAVIGRPNVGKSTLVNAILGEERVITFDMAGTTRDSIHIDFEREGKPFTIIDTAGVRRRGKVDEAVEKFSVIKAMQAVEAANVAVLVLDAQQDIADQDATIAGFALEAGRALVVAVNKWDGISEERREQVKRDINRKLYFLDFAKFHFISALKERGIDGLFDSIQAAYNAAMIKMPTPKITRVLQSAIERQQPPRAGLVRPKMRYAHQGGMNPPVIVVHGNSLHAISDSYTRYLTQTFRKAFNLQGTPLRIQYNVSENPYENAEDKPKKKPLRRVSLSNRIEKREGRKEEKNRFKKKTKVSVKKQFSK

SEQ ID NO: 1426 - protein, 209 aa, Neisseria
MAAHLEEQQELDNFKYFWKTTGKWLFALLILAALGYLGYTVYQNRKVSQNQEAAAVLANIVEKAQSKAPQSEINAELTKLQQSYPHSISAAQATLMAAATEFDAQRYDVAEGHLKWVLSNQKDSLIQALAAQRLGVVLLQQKKYDAALAALDTPVEADFAPLLMETKGDVYAAQGKSQEALKNYGQALEKMPQDSVGRELVQMKLDSLK

SEQ ID NO: 1427 - protein, 431 aa, Neisseria
MAQKIQSVKGMNDLLPVKQKDFKLTAAFWQAFEDTVGRWTRAYGYQQIRTPIVEQTGLFVRSIGEETDVVGKEMYTFSDSNDSLSLSLRPEGTASCLRAVVEHNLLYNSPQKLWYMGPMFRRERPQKGRYRQFHQVGIEALGFEGPDIDAEIIAMSADLWEKLGIREYLTLEINSLGNREERAAHRAALVEYLTRYEDKLDEDSKRRLKTNPLRVLDTKNPDLQEICNAAPRLVDYLGEDSQNHYVRFKAMLDGLGIQYIENPRLVRGLDYYNQTVFEWTTDKLGAQATVCGGGRYDGLIEELGGKPAPSIGFAMGIERLLLLVSEYGSLEVNAAPDVYAMHQGEGADLQVMKYAQALRAQGFNVMQHSGYQSLKAQMKKADNSGARFALIVAQDELANGTVTLKDMNGAHGQQTVAAEDLTPTLQQWKNA

SEQ ID NO: 1428 - protein, 218 aa, Neisseria
MMKFKYVFLLACVVVSLSYRLNAAPMFNDNPVVYGKIKVQSWKARRDFNIVKQDLDFSCGAASVATLLNNFYGQTLTEEEVLKKLDKEQMRASFEDMRRIMPDLGFEAKGYALSFEQLAQLKIPVIVYLKYRKDDHFSVLRGIDGNTVLLADPSLGHVSMSRAQFLDAWQTREGNLAGKILAVIPKKAETISNKLFFTQHPKRQTEFTVGQIRQARAE

SEQ ID NO: 1429 - protein, 155 aa, Neisseria
MQIDNISDEQVVIVRMSCYLKKDEIFKNIERYGYQSSDIKKISPPFPLNILPVPKPYYFYLYDTHLNQIYDLAWSCNDFLMFEIFILDRESIKYIDKDKLFKSRETLYSNFKSIKNQCKNYFFCGFDFDAPYFKSGVSQVADYNFVPDAFSLFFI

SEQ ID NO: 1430 - protein, 58 aa, Neisseria
MGEYLEFEESGTKITVEIGSAWHFNETIRNINTHLRGTKLPGSNWRVQDKGHFHLWKR

SEQ ID NO: 1431 - protein, 66 aa, Neisseria
MQLICADWTGIGNFMKTFEKTWSAQYRDMEISVRNFWNLERTGAEVYINGRRVYHNEAEMASASLR

SEQ ID NO: 1432 - protein, 125 aa, Neisseria
MSFGYLIATSQPCELLTKSRGETFSLIMDKMDLWIYFRFCEGNIYTIRKNETESCLTERGGEWLKHIYEFNRGSFIFSYVLLKKRESEENFTEIVLKSIKNNKILTVKVRSGLHFDLRNIYRIEM

SEQ ID NO: 1433 - protein, 85 aa, Neisseria
MDDVYRAFDSVGNILNFRIVEKEQKGFWVSTKIKTVVFDSADMSSDDLFLKCLQSSYKAYFETEPAGLDKRQLMKTLIQKCGFSC

SEQ ID NO: 1434 - protein, 181 aa, Neisseria; identical to SEQ ID NO: 88

SEQ ID NO: 1435 - protein, 39 aa, Neisseria
MTIFKLLDLQSDLPIEIGCATYVLSRALIFQPCNPKELL

SEQ ID NO: 1436 - protein, 90 aa, Neisseria
MFAVIFFSTLGCILAWIRDIPKIKSKKILARSLYIIGIINVIISYVLIKNILVSVSDGGGIKYVAIYLSNLFFWTVLMYVLVKRLSKKPS

SEQ ID NO: 1437 - protein, 96 aa, Neisseria
MDDLILYFLSGIFGNQVAEYIIKNNREIKVPFIVLYAIFFTLIYTVALLFLSLIYWVNGAEIAWKGIGIFSMSVSFCIVFCLYLIDKAGRCKDKKQ

SEQ ID NO: 1438 - protein, 157 aa, Neisseria
MKKQITAAVMMLSMIAPAMANGLDNQAFEKYVFHTQADAPMQLAELSQKEMKETEGAFLPIVAGALMGGAISAWANHGISKIKTGQFASTRSTLAATAGGMIGGGYSSAMLRGAGITTSVFARSAWKGGNAIPNAVIRANGAALNQSSSAAMGKHRR

SEQ ID NO: 1439 - protein, 289 aa, Neisseria
MKRIFLPALPAILPLSTYADLPLTIEDIMTDKGKWKLETSLTYLNSENNRAELAAPVYIQTGATSFIPIPTEIQENGSNTDMLVGTLGLRYGLTGNTDIYGSGSYLWHEERKLDGNSKTRNKRMSDVSLGISHTFLKDDKNPALISFLESTVYEKSRNKASSGKSWLIGATTYKAIDPIVLSLTAAYRINGSKTLSDGIRYKSGNYLLLNPNISFAANDRISLTGGIQWLGRQPDRTDGKRESSRNTSTYAHFGAGFGFTKTTALNASARFNVSGQSSSELKFGVQHTF

SEQ ID NO: 1440 - protein, 307 aa, Neisseria
MKKRNNPLPLLNGVKPSYLVLPHEKQFYGLPLLHFLCIRFPFVGADDWRRRLNSGFVVGSDGAALDEHSLFEPGKVVFYYRETSRESEPRIPFEEKILHIDEHLIVVDKPHFLPVIPSGRFLRETLLTRLRLRPELQHLNVEDITPLHRLDKDTAGVMLLSHNPATRGAYQTMFQNKTVWKTYEALAPTRTDLPYPLDVVSRLVRGEKFFTTQEAEGEPNAHTTVELIENRGEFSLYRLTPHTGKKHQLRVHMMGLGMPLLNDALYPVPSEAGSEDYRKPLKLLAKKIAFADPLSGRERVFCSGFCL

SEQ ID NO: 1441 - protein, 213 aa, Neisseria
MLKPETIHISGPAGILETIHIPSEQVPARGVAVINHPNPLQGGTNTNKVIQTAAKALSKLGFHCYLPNLRGVGGSGGTHDYGRGETQDCLAVIDYARAQHPEAPEFALSGFSFGGYVATFAAQARTPDLLLLIGAAVCHYTDRPEPSAVPNVAKTLMIHGAEDEVVEIGKALKWAEPQDLPVITIAGSTHFFHGKLIVLRDTILRFAPVCLNG

SEQ ID NO: 1442 - protein, 263 aa, Neisseria
MARHPYRRLRPAKSGFPEVGISEEGNIRSLHLGSDTVQSSMNLDHPSELVLSYSRAMMGWLLFTDALPQHITQIGLGGGSFARWIDTYLPDTRQTAVDINPQVIAIARNLFELPFEGEKFEIIEADGAEYIKVFRHNTDVILVDGFDGEQIIDALVEEPFFRDCRNALSSDGIFVTNWWSGDKRYQRFIERLLSVFEGRVLELPAESHGNVAVMAFQSSPKEQNIDKLKKRADKLSNAYGLDFHRMLAGLKASNPNNGKHFHL

SEQ ID NO: 1443 - protein, 263 aa, Neisseria
MITVNTLQKMKAAGEKIAMLTAYESSFAALMDDAGVEMLLVGDSLGMAVQGRKSTLPVSLRDMCYHTECVARGAKNAMIVSDLPFGAYQQSKEQAFAAAAELMAAGAHMVKLEGGVWMAETTEFLQMRGIPVCAHIGLTPQSVFAFGGYKVQGRGGKAQALLNDAKAHDDAGAAVVLMECVLAELAKKVTETVSCPTIGIGAGADCDGQVLVMHDMLGIFPGKTAKFVKNFMQGHDSVQAAVRAYVAEVKAKTFPAAEHIFAD

SEQ ID NO: 1444 - protein, 278 aa, Neisseria
MQIIHTIRELRAWRKNAGKVAFVPTMGNLHEGHLALVREAKKRADSVVVSIFVNRLQFGQGEDFDKYPRTLQQDADKLAAEGIAVVFAPDEKELYPNVEQRYNVEPPNLQNELCGKFRPGHFRGVATVVSKLFHIVSPDIACFGKKDYQQLAVIKGFVEDLNFDVEIVPVDTGRAEDGLALSSRNQYLSAAERDEAPRLYRELKAVAESLVQGSLDYAGLEKRAVQSLTEYGWVVDYVEIRRADTLEVARAGDKKLVVLAAACLGTTRLIDNLEIKLP

SEQ ID NO: 1445 - protein, 614 aa, Neisseria; identical to SEQ ID NO: 21

SEQ ID NO: 1446 - protein, 193 aa, Neisseria
MKHTVSASVILLLTACAQLPQNNENLWQPSEHISSFAAEGRLAVKAEGKGSYANFDWTYQPPVETININTPLGSTLGQLCQDRDGALAVDGKGNVYQAESAEELSRQLVGFKLPIQYLHIWADGRRVAGAPYRILPDGILEQYGWTVGRTADSGGQVRTLQLNNGNLNIRLVFTEIGMPSETETPERCAARTR

SEQ ID NO: 1447 - protein, 281 aa, Neisseria
MNIADGRQAFSAPAKLNLDLRITGRREDGYHNIESIFCLIDLQDTVYLKPRDDGKIILHNPVDGMPQEVDLSYRAASLLQKYARNPAGVEIWLDKKIPTGAGLGGGSSDAATVLLVLNRWWQCGLTQRQLIDSGAALGADVPFFIFGKNAFARGIGDRLDEMDIPKQWYVIVKPPVHVSTAKIFTHESLTRNSASSIMPTFQNLQPFRNDMQAVVFKEYPEVWKAYSELSRYGFALMTGSGACVFTACQDRNSAYNIYRQVSDLYEAYLAEGLSKHPLLSV

SEQ ID NO: 1448 - protein, 327 aa, Neisseria
MAAYDSLMVFTGNANPELAQRVVRHLDISLGNASVSKFSDGEVAVELLENVRGRDVFILQPTCAPTNDNLMEILTMADALKRASAGRITTAIPYFGYARQDRRPRSVRVPISAKLVANMLYSAGIDRVLTVDLHADQIQGFFDIPVDNIYATPILLNDIKQQRIENLTVVSPDIGGVVRARAVAKSLNADLAIIDKRRPKANVAEVMNIIGDIQGRTCLIVDDMIDTANTLCKAAVALKERGAERVLAYASHAVFSGEAVSRIASSEIDQVVVTDTIPLSEAAKNCDRIRQVTIAGLLAETVRRISNEESVSYLFNEEVMTGSMLLP

SEQ ID NO: 1449 - protein, 190 aa, Neisseria
MTYEIQASVREAQGTGASRRLRREGQIPGILYGEGQEPVAIAVDHKTVFYALEKESFHTALIKLSLNGETKDVIVRDFQMHPFRREVQHIDFQAVKADQLVRIRVPLHIVNAENSQAVKLQGGRVSLLNTSVEVVALPANIPAFLDLDCAEVVAGDILHLSDIKLPEGVESVSLKRNENLAVATVTGKKR

SEQ ID NO: 1450 - protein, 389 aa, Neisseria
MTAHKILPVLLSIILGVSHATAASPAPNRPTVHAAPTFQTPETLTAAHIVIDLQSKQILSAKNINTPVEPAALTQLMTAYLVFKNMKSGNIQSEENLKIPESAWASEGSRMFVRPGDTVSTDKLLKGMIALSANDAALTLAGRLGNGSIENFVQQMNKEARRLGMKNTVFKNPTGLSREGQVSTAKDLALLSEALMRDFPEYYPLFSIKSFKFKNIEQNNRNILLYRDNNVNGLKAGHTESGGYNLAVSYSGNGRHILVITLGSESAETRASDNSKLLNWALQAFDTPKIYPKGKTVAQIQISGGSKKTVRAGFLKEAYITLPHKEAKMAEQILETIQPIPAPVKKGQILGKIKIRQNGYTIAEKEIVALENVKKRSRWQRLWACLTGQ

SEQ ID NO: 1451 - protein, 508 aa, Neisseria
MNTPLPYSDYLIRILTASVYDVAVETPLEPARSLSVRLKNNILLKREDLQPVFSFKIRGAYNKMSKLPKDALACGVIAASAGNHAQGVALSAQRLGCRAVIVMPETTPKIKVDAVKSHGGEVVLRGVSYNDAYDYAMELAEKEGLTYIAPFDDPDVIAGQGTVGMEIVSQHPDPIRAVFVPIGGGGLAAGVAAFIKQVRPEIKVIGVQTNDSCCMKQSVEAGEIVHLKDVGLFSDGTAVKVVGNETFRLCKELLDEIITVDTDAVCGAVKDIFDDTRSITEPAGALALAGLKAYIAREGAENQTLIAVTSGANMNFHRLRHVSERSELGEGNEGIFAVTIPEERGSFLKFVNILGNRNITEFNYRYGDDEKAHIFVGLQAAGPQDLAVIGSRLDEAGLPNVDLTNNEIAKIHIRYMVGGRTDKVENERLVSFEFPERPGALARFLNHMQGGWNITLFHYRNHGADYGRILVGIDVPPHDAAAFDGFLESLGYSYHEETQNAAYKLFLA

SEQ ID NO: 1452 - protein, 357 aa, Neisseria
MSITIQNLNKHFGNFHALKNINLNVPTGKLVSLLGPSGCGKTTLLRIIAGLENADGGNILFDGQDVTAKHVRERKVGFVFQHYALFRHMNVFDNVAFGLTVLPKSERPSKGQIRAKVEELLKLVQLSHLAKSYPHQLSGGQRQRIALARALAVEPKLLLLDEPFGALDAKVRKELRTWLRDIHHNLGVTSILVTHDQEEALEVSDEIVVMNHGKIEQTGSAEAIYRKPENAFVTEFLGETDAFEGRIEKGFWHYNGFAWKLDAQYKWQEQTATGYIRPHEWQIAAEHETPMICAEIEKIHAVGALTHILVKHDKQDVHITLAGSDAARYPIAEGKELKLIPKQVYVFSQNELIEYSI

SEQ ID NO: 1453 - protein, 286 aa, Neisseria
MKPYSANPNLTEPRRLRVLLIAAALGFLLLMLVVPLVAVFYEALKGGWDLYLKSLNDPEAWSAIKLTLITALIVVPVNAVLGVAMAWLLTRFDFRGKQLLTTLLDLPFSVSPVVAGLMFVLLFGAHTALGGWLEAQGIQIIFAIPGIVLATLFVTFPFVAREIIPLMQAQGDSEEQAALILGASGWQMFWRVTLPNIKWALLYGIILTNARAMGEFGAVSVVSGHIRGETNTVPLLVEIFYNEYNFTGAFALSGVLALLALATLAVQNIITKLQDKKLAAAERNAI

SEQ ID NO: 1454 - protein, 278 aa, Neisseria
MLALKTPGVLPGFKLSLGLTVLCLSLLVVLPFAMMAAKAAEIGWGGFWNTIAEPNVLAAVWLSLRMSFYAMLTNVVFGTLVAWVLVRYEFPGKGLANALVDLPFALPTAVTGIALATLYAPNGWIGRFFEPLGIKIAFTPVGIWIALVVVSLPFIVRAVQPVLEELSGEYEEAAATLGASRWTTFRRVLLPEITPALLTGAGMMFARATGEYGSVIFIAGNIPMVSEILPLIITGKLEQFDVQGASAVALFMLLVSFVILFALNVMQWALGRRSGAKG

SEQ ID NO: 1455 - protein, 110 aa, Neisseria
MQILSFQPDIAERMLEGTEGESVNENAQFVRTDNGYWIAWHEGVAALLAPDMPPGIPCFWVEGAESLEELCVMVERGEFDEVEEFDGDDDEWLETAQGCGHHGDACACGH

SEQ ID NO: 1456 - protein, 169 aa, Neisseria
MTMILSILSLFFIIRLLFLAVSIKHEKALIAKGAKQYGKTNSTLLAAVHTLYYLACFVWVWLSDTAFNGISLIGTLTVMASFVILSLIIKQLGEIWTVKIYILPNHQINRSWLFKTFRHPNYFLNIIPELIGIALLCQAWYVLLIGLPIYLLVLFKRIRQEEQAMATLF

SEQ ID NO: 1457 - protein, 195 aa, Neisseria
MEHKLPQLPYELDALSPHLSKETLEFHYGKHHQTYITNLNNQIKGTEFENLPLEEIVKKSSGGVFNNAAQTWNHTFYWLGFTSKGQGKPAGELAAAIDAKWGSFEKFQEAFNACAAGTFGSGWAWLVKTPAGGLDLVSTSNAATPLTTENTPLLTCDVWEHAYYIDYRNSRPNYLKGFWEIVNWDEVAKRFAALS

SEQ ID NO: 1458 - protein, 468 aa, Neisseria
MNDYAAMPSEDREVGALSLPPHSMEAEQSVLGGLMLENPAWDRIADVVSGEDFYRHEHRLIFRSIAKLINESRPADVITVQEDLQRNEELEAAGGFEYLITLAQNTPSAANIRRYAEIVRERSIMRQLAEVGTEIARSAYNPQGRDAGQLLDEAENKVFQIAESTAKSKQGFLEMPDLLKEVVQRIDMLYSRDNPDEVTGVPTGFIDLDKKTSGLQPGDLIIVAGRPSMGKTAFSINIAEHVAVEGRLPVAVFSMEMGGAQLVMRMLGSVGRLDQSVLKTGRLEDEHWGRLNEAVVKLSDAPVYIDETPGLTALELRARARRLARQFNNKLGLIVIDYLQLMAGSGRSDNRASELGEISRSLKALAKELQVPIIALSQLSRTVESRTDKRPMMSDLRESGAIEQDADLIMFMYRDEYYNQDSPMKGLAECIIGKHRNGPVGKIFLTWTGQFTKFDNAAYIPEEAKIED

SEQ ID NO: 1459 - protein, 222 aa, Neisseria
MCTRKQQGFTLTELLIVMVIAAIMAMIALPNMSQWIASRRIASHAERIANLLRFSRGEAVRLNLPVYICPVQVKKDGTPNNKCDSGKKGQGMLAFGDKNGNKGYDNDTEDVLLRSVVLNDDINDKRINYAFNHIAFGQTQPTTDRVVWTFNQNGTFGYTKDQHLTKQSSFFYSDGYIQIVLTDAKAVSADEKKFRSAVVLINSSGRVEVCPRGDRRTMCQYK

SEQ ID NO: 1460 - protein, 204 aa, Neisseria
MNMKNNDCFRLKDSQSGMALIEVLVAMLVLTIGILALLSVQLRTVASVREAETQTIVSQITQNLMEGMLMNPTIDSDSNKKNYNLYMGNHTLSAVDGDFAIDAMKTKGQLAEAQLKRFSYELKNALPDAAAIHYAVCKDSSGNAPTLSGNAFSSNCDNKANGDTLIKVLWVNDSAGDSDISRTNLEVSGDNIVYTYQARVGGRE

SEQ ID NO: 1461 - protein, 313 aa, Neisseria
MRRKMLNVPKGSYDGMKGFTIIEFLVAGLLSMIVLMAVGSSYFTSRKLNDAANERLAAQQDLRNAATLIVRDARMAGGFGCFNMSEHPATDVIPDTTQQNSPFSLKRNGIDKLIPIAESSNINYQNFFQVGSALIFQYGIDDVNASTATTVVSSCAAISKPGKQIPTLEDAKKELKIPDQDKEQNGNIARQRHVVNAYAVGRIADEEGLFRFQLDDKGKWGNPQLLVKKVRHMKVRYIYVSGCPEDDDAGKEETFKYTDKFDSAQNAVTPAGVEVLLSSGTDTKIAASSDNHIYAYRIDATIRGGNVCANRTL

SEQ ID NO: 1462 - protein, 197 aa, Neisseria
MRKQNTLTGIPTSDGQRGFALFIVLMVMIVVAFLVVTAAQSYNTEQRISANESDRKLALSLAEAALREGELQVLDLEYDTDSKVTFSENCGKGLCAAVNVRTNNDNEEAFDNIVVQGKPTVEAVKRSCPANSTDLCIDKKGMEYKKGTRSVSKMPRYIIEYLGVKNGENVYRVTAKAWGKNANTVVVLQSYVSNNDE

SEQ ID NO: 1463 - protein, 162 aa, Neisseria; identical to SEQ ID NO: 170

SEQ ID NO: 1464 - protein, 79 aa, Neisseria
MTDFRLGSFIGKSRNRSAVIPTKVGIQFFEFQSFPINCLSIECLDSRLRGNDEPIRTETCTASFPRKWESSFLSFSHFQ

SEQ ID NO: 1465 - protein, 140 aa, Neisseria
MLIGLLPWALILGMQGGQKGMSWLEMLLMTSMNFAGGSEFATVNLWAEPLPILLIATVTFMINSRHILMGAALAPHLKGIPLKKAVPALFFMCDESWAMAFSEIQKRKAAGLPAFNMPFYSGLTKTSTALPRLSSKKTIL

SEQ ID NO: 1466 - protein, 150 aa, Neisseria
MNIEVEMKVLDERMADVVPVYATEGSAGLDLRACLDEEVVLQPGETFLVPTGLAIYLANPAYAAVLLPRSGLGHKHGIVLGNLVGLIDSDYQGELKVSLWNRSSEPFTVKPFERIAQMVVVPIVQAGFKRVEEFVGSSRGEGGFGSTGSH

SEQ ID NO: 1467 - protein, 395 aa, Neisseria
MNTLLNQLKPYPFARLREAMQGISAPEGLEAVPLHIGEPKHPTPKVITDALTASLHELEKYPLTAGLPELRQACANWLKRRYDGLTVDADNEILPVLGSREALFSFVQTVLNPVSDGIKPAIVSPNPFYQIYEGATLLGGGEIHFANCPAPSFNPDWRSISEEVWKRTKLVFVCSPNNPSGSVLDLDGWKEVFDLQDKYGFIIASDECYSEIYFDGNKPLGCLQAAAQLGRSRQKLLMFTSLSKRSNVPGLRSGFVAGDAELLKNFLLYRTYHGSAMSIPVQRASIAAWDDEQHVIDNRRMYQEKFERVIPILQQVFDVKLPDASFYIWLKVPDGDDLALARNLWQKAAIQVLPGRFLARDTEQGNPGEGYVRIALVADVATCVKAAETIVSLYR

SEQ ID NO: 1468 - protein, 259 aa, Neisseria
MFFVLSPAKNLNEKDPAPVSEFTQPDLLAESDILMQQLRELAPQQIAELMHVSDKIALLNAQRNAEWNTPFTPENAKQAVFMFNGDVYEGMDANTLDIGQIRYLQNHVRLLSGLYGLLRPLDLIQPYRLEMGTAFANLRGKNLYEFWGDIITNLLNDTLAQAGSNTLVNLASQEYFKSVNTKKLRARLITPIFKDEKNGKYKIISFYAKRARGLMVRYAAEHHITDPEMLKNFNYEGYAFNDAASNESEWVFMRSEQIK

SEQ ID NO: 1469 - protein, 126 aa, Neisseria
MPLKFQPRERSVIMCDFRGYEEPEMVKKRPVVVIARNRHNGKLVTVVPLSSTEPVPLADYHHKMSGNPLPDKPHIQCWAKCDMTATVGLARLDRYKPKGRDRCIPIISEEDFQAIKTAVAKAFKLY

SEQ ID NO: 1470 - protein, 62 aa, Neisseria
MGSRARATGDDKPSVRVMGRGMRPLSYLQTPTNPQSAFQSRLFWTNPPLPPPVPVWLSLCPP

SEQ ID NO: 1471 - protein, 118 aa, Neisseria
MAERNNAALQEAITIVNGLAKTDGCILATYTSDTPDKKKDREAILTVLNQREFVCAGVLGGALHEKMYKDFEYSMLLRDWDNLSSFIFEIRRIRSAPTAFQEFEAVARKWKKKPLKTK

SEQ ID NO: 1472 - protein, 305 aa, Neisseria
MNVSVLNFGNTPVSFRQDGFLNATAIASHFGKLPKDYLKSEQTQQYISALAENLSVRRKILTEANQIVIVKRGGSEQGTWLHPKLAIHFARWLNPKFAVWCDEQIEILLNGKISDGIKTVTPKPTRALPDGLTGEQIEAVKKLHNALTKSAPKEAQARIAITLWSAVKSKFGCSYKEVPAEQFPEVLSVMGRVAVENGVLYGEVLDREPLPAPQPALPISGNALYDLAVAVRYGAWAIQMGRDVSLPLKQLGCKQAVTMWTVWAETRSRLKAAANALEALNAHADAEHAAKIRPMLPEIRNLSSV

SEQ ID NO: 1473 - protein, 94 aa, Neisseria
MAFHHGRRCRITPLPETESLQESKKMNINELGARIDRPTIRELIAYATCRNRPISNSTLLRMEKDGRIPCRLKTPLTSPVWDTREVLEALGLQQ

SEQ ID NO: 1474 - protein, 63 aa, Neisseria
MNTNQDTIPFGGNLVICCSTGNGGDGRFSCLITDQIPDLNLVRSGQAFPMFIYEYETREKRKA

SEQ ID NO: 1475 - protein, 97 aa, Neisseria
MNFQEENENIKNDIEINLLHSAEADSVEAMMDLAVYGLAAMVAKHNKTRGEQLVLQAIAGHMRKLLAALPETESLVQTGKVYRRLEDLIFKTYLPEQ

SEQ ID NO: 1476 - protein, 86 aa, Neisseria; identical to SEQ ID NO: 463

SEQ ID NO: 1477 - protein, 71 aa, Neisseria
MTITEEYSIDIRVTSEQGKNDYGYPTERYGCDIINTDGELLVGIEPEYKTPFAAVRKALICLTKDNLKNAA

SEQ ID NO: 1478 - protein, 284 aa, Neisseria
METQENMIKTALQAAQKPFFEFAPNNTPLVFTPDQDGGWRYKSHPELMQNPYRKCGKFLMHDTASLIKFVQKHKQDGTQIYIDADFKSGRIDVTAVINGHTQQAPGWLDFYAVYTPQHTTSASNWLNNNAHRMNQMEFSHFLTNNARNIVSKNPGNENSVYPTAAEVLDFALNLEYTEKTTFKQGYREQDGRINFTFQSEDSGQTEKNLKMFERFGIEFTPHQGGASYFVEALLKFRIDKNSGALVLWYELQQIDAVIEQAAKDISEAVQKAFPEIDIYFGVIA

SEQ ID NO: 1479 - protein, 119 aa, Neisseria
METQEKKFVPASKQIPTVNSGWLDRELGEAMSEAVRACLAHGKQSEITVKLKIQPQNIQSGTVKISHDVATKLPKEKREGGIVFATPDGNIQADDPAQGKLKLKQVSNTSSTLKMVRSN

SEQ ID NO: 1480 - protein, 66 aa, Neisseria
METITIPKENFDALLNLARTAVALNENFIPKINYGASTIPAAGFAALNEFGIARSTVESLEILKIK

SEQ ID NO: 1481 - protein, 174 aa, Neisseria
MLLLRRDNIDRAFKIVKNRRFDSPWWPGEYDAGMNFLGVQGELKVHELHHRTATLCFEWLGEVSAPRRKENYKDLKPNVLYDFDGSGKHFANPDARYLLPVGSSGLILKHIQIDDEDTLLRLWCARNIPMPHRLSKIPMLRQYYLSKAWHEIYAINQHLRKTKLIVDVAYDPTD

SEQ ID NO: 1482 - protein, 238 aa, Neisseria
MTMHETTDRLFEIAKEQGVLKPADIAERLNISQQALKNWESRGIAAKALPEVAKAFGVSETWLRTGEGSRTAPVLIDPDLPHEVKDIHRPMTWSSNDPLPDDDYVFVPYLKESCFKGGVGTYEIPDYNGYRLPFGKSTLKRKGINPDNVFCCTLTGDSMEEKIAEDAAIAVDTGETAIRDGKIYAFAQDGMFRVKYLIRQPGNSVLIRSHNSGFYGDENAPLDSLTVIGRVFWWSVLD

SEQ ID NO: 1483 - protein, 321 aa, Neisseria
MSHTQLTQGERYHIQYLSRHCTVTEIAKQLNRHKSTISREIRRHRTQGQQYSAEKAQRQSQTIKQRKRQPYKLDSQLIQHIDPLIRRKLSPEQVCAYLRKHHQITLHHSTIYRYLRQDKSNGSTLWQHLRICSKPYRKRYGSTWTRGKVPNRVGIENRPAIVDQKSRIGDWEADTIVGKGQKSALLTLVERVTRYTIICKLDSLKAEDTARAAVRTLKAHKDRVHTITMDNGKEFYQHTKITKALKAETYFCRPYHSWEKGLNENTNGLIRQYFPKQTDFRNISDREIRRVQDELNHRPRKTLGYETPSVLFLNLFQPLIH

SEQ ID NO: 1484 - protein, 208 aa, Neisseria
MGTHRFPTQQPATQPDTDRNQEKRQNRVSARAASLRSSEMDILLKYWKPVGVLLLIVLIFTAWHFDRAEKYRMGREAAAAEISNRLKDGYIEQAKQARSAEQKAAAAFAERQTKLEEEKQNAEKTVAAMRLELNRLRHYAAAQNRNRNLPATATAATASDGASDSQGWLLFGQCAEKYAGLAETADGHAADLREWQAYGHAVSSQRAE

SEQ ID NO: 1485 - protein, 115 aa, Neisseria
MYIPDKGDIFHLNFDPSSGKEIKGGRFALALSPKAFNRATGLVFACPISQGNAAAARSSGMISTLLGAGTETQGNVHCHQLKSLDWQIRKASFKETVPDYVLDDVLARIGAVLFD

SEQ ID NO: 1486 - protein, 78 aa, Neisseria
MLRVQKWGNSAAVRLPADMLKQLDFKIGDALVAEVHNGELRVRAARRFRLADLLAEMEETPPRVEGWEILDDAGNEVV

SEQ ID NO: 1487 - protein, 163 aa, Neisseria
MFWQLTVVSVTAVIALGTIFINKKTSKQKATLDVILNDYQDAQFVEADNHISPYIRGTAVDDNNARIDLYEIYQNKGGQWEKERGHLLTVINRHEFYACAINSGVLDEDLFKRLHCTNFIKLWNAVSPLVMKIREEERKDTIFRELEILVALWKANPLKASDL

SEQ ID NO: 1488 - protein, 46 aa, Neisseria
MRVLMAGKVRKQIKQGGWLSVIALTSLFVSVFTLFYIFRHSVQFNL

SEQ ID NO: 1489 - protein, 122 aa, Neisseria
MIDGELVALIHQTVLADEAGLKGRADMARLDGALSRIANWRQYENLEDIYEIAALYAQAIAKAHAFPDGNKRTALLTMLTYLDLQGISIAADQGLDDLIVSLAAGETDFKQLAETLRRLDKE

SEQ ID NO: 1490 - protein, 43 aa, Neisseria
MQNQNTRPVKIELKGEAGKRVLLAAARRIAKTHQKAVKALADK

SEQ ID NO: 1491 - protein, 319 aa, Neisseria
MSTFFQQTAQAMIAKHIDRFPLLKLDQVIDWQPIEQYLNRQKTRYLRDHRGRPACPLLSMFKAVLLGQWHNLSDPELEHSLITRIDFNLFCRFDELSIPDYSTLCRYRNRLAQDDTLSELLELINRQLTEKGLKVEKASAAVVDATIIQTVGSKQRQAIEVDEEGQVSGQTTLSKDKNARWTKKNSLYKLGYKQHTRTDAEGYIEKLHITPANAHECKHLSPLLEGLPEGTTIYADKGYDSAENRQHLEEHQLQDGIMRKACRNRPLTETQTKRNRYLSKTRYVVEQSFGTLHRKFRYARAAYFGLICARCRLKGSPDA

SEQ ID NO: 1492 - protein, 741 aa, Neisseria
MTQKSTIVYTHTDEAPALATQSLLPIVQAFARHADIDVKTSDISLSGRILAAFPEYLTEAQRVPDALAELGELVKQPDANVIKLPNISASVPQLTAAIKELQSKGFAVPDYPADPQTDEEKAVRERYDRIKGSAVNPVLREGNSDRRAPKAVKNFAKKNPHSMGAWTKDSKTHVATMQSGDFFHNEQSVIVPEATSVSIVFTDKQGNKKELREPVALKAGEIIDATVMSKKALLAFLAEQVKDAKAKGVLFSLHMKATMMKVSDPIIFGHAVKVFFAPVFEKFGDKLAAAGVNVNNGFGNLLANLDKLDADTRTAVEAEIAAVYAANPDLAMVDSDKGITNLHVPSDVIVDASMPAMIRNSGRMWDKNGKAQDTKAVIPDSSYAGVYQATIDFCREHGAFDPTTMGTVPNVGLMAQAAEEYGSHNKTFEIEADGQVQVIDAAGKVLMQHDVEAGDIWRMCQTKDAPVKDWVQLAVNRARLSNTPAVFWLDENRPHDKSLLAKVKAYLAELDTNGLDIRVLAPEEAAKFSLGRLKNGEDTISVTGNVLRDYLTDLFPILELGTSAKMLSIVPLMNGGGMFETGAGGSAPKHVQQFLEENHLRWDSLGEFLALAVSFEHLAQKTGNAKAQVLADTLDAATEKLLLNDKSPKRKAGELDNRGSHFYLTLYWAQELAAQDKDAELKAAFTPLAAALTADEAKIVAELSAVQGKAADIGGYYAANPEKAAQVMRPSVTFNQALNAL

SEQ ID NO: 1493 - protein, 66 aa, Neisseria
MPPHIRHSTSDRRQTRENHFPLPFTPPRSNTPRSNKARTKPPKYAIIATHIPRAMCSKRKNQPTRE

SEQ ID NO: 1494 - protein, 371 aa, Neisseria
MGLKKACLTVLCLIVFCFGIFYTFDRVNQGERNAVSLLKEKLFNEEGEPVNLIFCYTILQMKVAERIMAQHPGERFYVVLMSENRNEKYDYYFNQIKDKAERAYFFHLPYGLNKSFNFIPTMAELKVKSMLLPKVKRIYLASLEKVSIAAFLSTYPDAEIKTFDDGTGNLIQSSSYLGDEFSVNGTIKRNFARMMIGDWSIAKTRNASDEHYTIFKGLKNIMDDGRRKMTYLPLFDASELKTGDETGGTVRILLGSPDKEMKEISEKAAKNFKIQYVAPHPRQTYGLSGVTTLNSPYVIEDYILREIKKNPHTRYEIYTFFSGAALTMKDFPNVHVYALKPASLPEDYWLKPVYALFTQSGIPILTFDDKN

SEQ ID NO: 1495 - protein, 152 aa, Neisseria
MKTQISLAAAAITLLLSACGGSGIPSQPKGEISENRTAAFKSMMPEFTRMGKMVKDEEPYDVEKFKQAAASFAESSKKPFTLFESDPQGNGRALPAVWSDGAKFEAEKTKFAAAVEKLNAAAQTGKLDEIKAAYGETGASCKSCHDSFRAPE

SEQ ID NO: 1496 - protein, 273 aa, Neisseria
MAVLITGASAGFGEAMCRAFVGAGYRVIGAARRADRLQALADELGALFYPLEMDVSRRESVENALNGIPDEFSDIDCLINNAGLALGLDTADKADFEDWETMIQTNVLGLTFLTRKILPQMVERGGGYVMNLGSIAGNYAYAGSNVYGATKAFVRQFSLNLRAELADKNIRVTNIEPGLCGNTEFSNVRFKGDDERAAGVYEGVEFIRPEDIAETALWLYQRPAHMNVNTIEIMPVAQTFAGMKVIKKAVPEVREDFEKQSMSLFSRIRSWFK

SEQ ID NO: 1497 - protein, 148 aa, Neisseria
MQHEEGNRQRPQGELLLRTVAMPRDTNPNQDIFGGWIMSQMDLGGGILAAEIARGRIVTVAVQEMNFIRPVKVGNVVCCYGHCVRVGNTSLQLKVDVWVKTLMNDCVTEDRYLVTEAVFTYVAIDAEGNPRPIPKEGNPKLAGLLPTP

SEQ ID NO: 1498 - protein, 310 aa, Neisseria
MYEIKQPFHSGYLQVSEIHQIYWEESGNPDGVPVIFLHGGPGAGASPECRGFFNPDVFRIVIIDQRGCGRSRPYACAEDNTTWDLVADIEKVREMLGIGKWLVFGGSWGSTLSLAYAQTHPERVKGLVLRGIFLCRPSETVWLNEAGGVSRIYPEQWQKFVAPIAENRRNRLIEAYHGLLFHQDEEVCLSAAKAWADWESYLIRFEPEEVDEDAYASLAIARLENHYFVNGGWLQGDRAILNNIGKIRHIPTIIVQGRYDLCTPMQSAWALSKAFPEAELRVVQAGHRAFDPPLVDALVQAVEDILPHLL

SEQ ID NO: 1499 - protein, 398 aa, Neisseria
MPSEPFGRHNATNTLISITQDDTMTHIKPVIAALALIGLAACSGSKTEQPKLDYQSRSHRLIKLEVPPDLNNPDQGNLYRLPAGSGAVRASDLEKRRTPAVQQPADAEVLKSVKGVRLERDGSQRWLVVDGKSPAEIWPLLKAFWQENGFDIKSEEPAIGQMETEWAENRAKIPQDSLRRLFDKVGLGGIYSTGERDKFIVRIEQGKNGVSDIFFAHKAMKEVYGGKDKDTTVWQPSPSDPNLEAAFLTRFMQYLGVDGQQAENASAKKPTLPAANEMARIEGKSLIVFGDYGRNWRRTVLALDRIGLTVVGQNTERHAFLVQKAPNESNAVTEQKPGLFKRLLGKGKAEKPAEQPELIVYAEPVANGSRIVLLNKDGSAYAGKDASALLGKLHSELR

SEQ ID NO: 1500 - protein, 291 aa, Neisseria
MLQGSLVALITPMNQDGSIHYEQLRDLIDWHIENGTDGIVAVGTTGESATLSVEEHTAVIEAVVKHVAKRVPVIAGTGANNTVEAIALSQAAEKAGADYTLSVVPYYNKPSQEGIYQHFKTIAEATSIPMIIYNVPGRTVVSMTNDTILRLAEIPNIVGVKEASGNIGSNIELINRAPEGFVVLSGDDHTALPFMLCGGHGVITVAANAAPKLFADMCRAALQGDIALARELNDRLIPIYDTMFCEPSPAAPKWAVSALGRCEPHVRLPLVPLTENGQAKVRAALKASGQL

SEQ ID NO: 1501 - protein, 463 aa, Neisseria
MSGQLGKGADAPDLVYGLEDRPPFGNALLSAVTHLLAIFVPMITPALIVGGALELPVEMTAYLVSMAMVASGVGTYLQVNRFGPVGSGMLSIQSVNFSFVTVMIALGAGMKEGGLTKDAMISTLLGVSFVGAFLVCFSAWLLPYLKKVITPTVSGVVVMLIGLSLVHVGITDFGGGFGAKADGTFGSMENLGLASLVLLIVLVFNCMKNPLLRMSGIAVGLIAGYIVALFLGKVDFSALQNLPLVTLPVPFKYGFAFDWHAFIVAGAIFLLSVFEAVGDLTATAMVSDQPIEGEEYTKRLRGGVLADGLVSVIATALGSLPLTTFAQNNGVIQMTGVASRHVGKYIAVILVLLGLFPVVGRAFTTIPSPVLGGAMVLMFGLIAIAGVRILVSHGIRRREAVIAATSVGLGLGVAFEPEVFKNLPVLFQNSISAGGITAVLLNLVLPEDKTEAAVKFDTDHLEH

SEQ ID NO: 1502 - protein, 250 aa, Neisseria
MANQRPIYGFHAVNARLWQNPKSIVELYIQEGKSDARTREVLEKAANENIRVYFADADRLNAISKGARHQGVVGFIDASKNHVHLEDVLENLSEPPLLLILDGITDPHNLGACLRTADAMGVHAVIAPKDKSAGLNATVSKVACGAAETVPYITVTNLARTLRELKEYGIWIIGTDMSGESDLYHCNLPDSAAWVMGNEGDGMRRLTREHCDMLVSIPMFGTVESMNVSVSAGMVLSETRRQRVLKNEKV

SEQ ID NO: 1503 - protein, 162 aa, Neisseria
MTVLTVILALALIAVGTAGIVYPALPGLALMFAGTWLLAYAGGYQIYGAGVLWTVGLISLAGILADYVAGIWGTKYTGAGKLAVRGALAGSIIGIFFSLPGLILGPFIGAAAGELIERRNMLQAGKAGLGTLLGLVVGTAFKIGCAVSILFILLVKYIAYLF

SEQ ID NO: 1504 - protein, 239 aa, Neisseria
MLTTPPLAPKTVAALHRLGIRTLEELRQNGSVKAFLLLKASGLTLTKSTLWQLESLLDGTPPQEMSQAHKARLLAELKNHPPVAAFPPQEEMEHFMCEALRQAEQSSADGEIPVGAVIVSDGKIIASAHNTCIADCNVSRHAEINALAQAGREIQNYRLDGCDIYITLEPCAMCASALIQARIRRVIYGAAEPKTGAAGSIVNLFADKRLNTHTAIRGGILQEECRAVLSRFFQNKRKG

SEQ ID NO: 1505 - protein, 313 aa, Neisseria
MPTPKAFALLGPTAGGKTALALKIAETLPVEIISLDSALVYRDMDIGTAKPSASERAFVPHHLIDIIPPTESYSAARFVEDCTRLVGEISSRGRFALIVGGTMMYFRALTQGLNDLPEADACLRADLDEQKQMYGLDFLYRTLQKVDPETACRLKPNDSQRIGRALEVYYLTGKPMSTHLGSLTSHTLPFDLHTAALIPENRARLHENIALRFHLMLEQGFIGEVENLRRRYPGLTAYSPAIRCVGYRQAWKYLDGKTDFPAFVEKGIAATRQLAKRQLTWLRKTPLDCVADPFSDCTSCTRLIEAAKRFFGA

SEQ ID NO: 1506 - protein, 434 aa, Neisseria
MDILVLRVDVPKEGFARKLGAHETVFAADDGAVGKVQQLVEVLLRHERDFDEADGCRLKNIAVVLQGILRNNAALFEAVDDLRPRQQQCHRAACLSPHFQPLCPNIAPIAEKQPFGGVFFGQHQPLSQGFSIETDGFAVITFAYQPAAFFAETHKPKIFLNTLLRRRHQMQPFIAFLRAQIFPIQPKRLVSADNVQHIFGQVAGKSFDDDIGNRRGINICRIGMPSADMNILMNAGNIGQIRAKRTQGGHIVRPQMHLPTEFAVQNTGEPPRNADVAEIVDDLAKNPTDKRRSIHRNNGNGLKRAKIVEQIHNQQNNRNKQQHSLTFQIKLLFQMMLDGVEKDEFKQKRRFAGKDDAVDQMLEFVFGRIGGENGKRRQRDEADGKPADKQVSGHCKAFKKAKRHYRPKRTPCLTDAPEMPSEALPQENAAPPNL

SEQ ID NO: 1507 - protein, 186 aa, Neisseria
MKTAQELRAGNVFMVGNDPMVVQKTEYIKGGRSSAKVSMKLKNLLTGAASETIYKADDKFDVVILSRKNCTYSYFADPMYVFMDEEFNQYEIEADNIGDALKFIVDGMEDQCEVTFYEGNPISVELPTIIVREVEYTEPAVKGDTSGKVMKTARLVGGTEIQVMSYIENGDKVEIDTRTGEFRKRA

SEQ ID NO: 1508 - protein, 278 aa, Neisseria
MKNKTSSLLLWLTAIMLTACSPSKDDKTKEVGASAASSSASSAPSQTDLQPTASAPDNVKQAESAPPSNCTSLHPATGIDDLMQQIAEHIDSDCLFALSHHELETRFGLPDGGYDNIQRLLFPDIRPEDPDYHQKIILAIEDLRYGKRTISRQAQNALMEQERRLREATLLLIQGSQETRGQGEEPKRTRYFEVSATPAYSSRHNNGLGGNFQYISQLPGYLKIHGEMLENQSLFRLSNRERNPDKPFLDIHFDENGKITRIVVYEKNIYFNPNTGRI

SEQ ID NO: 1509 - protein, 193 aa, Neisseria
MNLRDDLQLIYDRIPEGSRVLDLGCGDGELLAALVEHKKCSGYGIEIDTNSVIAAMSRGVNVIQADLEEGLTAFNDQSFDVIVLSQTIQAMQNTEKILRCLMRVAKQAIVSFPNFGYWRNRVQIALGGHMPVSERMPYHWYDTPNIHWCTLKDFDLLCAKNNIRILERAVMTGNRQVKHFPNLLGSLAFYRVG

SEQ ID NO: 1510 - protein, 379 aa, Neisseria
MSQNASVGIVMPQKIPFEMPLVLENGKTLPRFDLMIETYGELNAEKNNAVLICHALSGNHHVAGRHSAEDKYTGWWDNMVGPGKPIDTERFFVVGLNNLGGCDGSSGPLSINPETGREYGADFPVVTVKDWVKSQAALADYLGIEQWAAIVGGSLGGMQALQWTISYPERVRHALVIASAPKLSTQNIAFNDVARQAILTDPDFNEGHYRSHNTVPARGLRIARMMGHITYLAEDGLGKKFGRDLRSNGYQYGFGVEFEVESYLRYQGDKFVGRFDANTYLLMTKALDYFDPAADFGDSLTRALQNVKAKFFVASFSTDWRFAPERSHELVKALIAAQKSVQYIEVKSAHGHDAFLMEDEAYMRAVAAYMNNVYKECQQ

SEQ ID NO: 1511 - protein, 41 aa, Neisseria
MQVLSSLKTAKQRHRDCQIVRRRGKVYVICKSNPRFKARQR

SEQ ID NO: 1512 - protein, 91 aa, Neisseria
MKPNIHPDNYRTVLFFDSSANEGWLIRSCAETHGKTMVWTDGKEYPLFSLDTSSASHPVYTGKQRNVNTEGRASKFNQRFQSVMSSFRKDK

SEQ ID NO: 1513 - protein, 292 aa, Neisseria
MNYAKEINALNNSLSDLKGDINVSFEFFPPKNEQMETMLWDSIHRLQTLHPKFVSVTYGANSGERDRTHGIVKRIKQETGLEAAPHLTGIDASPDELRQIAKDYWDSGIRRIVALRGDEPAGYEKKPFYAEDLVKLLRSVADFDISVAAYPEVHPEAKSAQADLINLKRKIDAGANHVITQFFFDVERYLRFRDRCVMLGIDVEIVPGILPVTNFKQLGKMAQVTNVKIPSWLSQMYEGLDDDQGTRNLVAASIAIDMVKVLSREGVKDFHFYTLNRSELTYAICHILGVRP

SEQ ID NO: 1514 - protein, 758 aa, Neisseria
MTTLHFSGFPRVGAFRELKFAQEKYWRKEISEQELLAVAKDLREKNWKHQVAANADFVAVGDFTFYDHILDLQVATGAIPARFGFDSQNLSLEQFFQLARGNKDQFAIEMTKWFDTNYHYLVPEFHADTEFKANAKHYVQQLQEAQALGLKAKPTVVGPLTFLWVGKEKGAVEFDRLSLLPKLLPVYVEILTALVEAGAEWIQIDEPALAVDLPKEWVEAYKDVYATLSKVSAKILLSTYFGSVAEHAALLKALPVDGLHIDLVRAPEQLDAFADYDKVLSAGVIDGRNIWRANLNKVLETVEPLQAKLGDRLWISSSCSLLHTPFDLSVEEKLKANKPDLYSWLAFTLQKTQELRVLKAALNEGRDSVAEELAASQAAADSRANSSEIHRADVAKRLADLPANADQRKSPFADRIKAQQAWLNLPLLPTTNIGSFPQTTEIRQARSAFKKGELSAADYEAAMKKEIALVVEEQEKLDLDVLVHGEAERNDMVEYFGELLSGFAFTQYGWVQSYGSRCVKPPIIFGDVSRPEAMTVAWSTYAQSLTKRPMKGMLTGPVTILQWSFVRNDIPRSTVCKQIALALNDEVLDLEKAGIKVIQIDEPAIREGLPLKRADWDAYLNWAGESFRLSSAGCEDSTQIHTHMCYSEFNDILPAIAAMDADVITIETSRSDMELLTAFGEFQYPNDIGPGVYDIHSPRVPTEAEVEHLLRKAIEVVPVERLWVNPDCGLKTRGWKETLEQLQVMMNVTRKLRAELAK

SEQ ID NO: 1515 - protein, 54 aa, Neisseria
MNKYRLKAFQTVFCPDLRRKGAVAGKSFHCSLFFSNSALYVGNRQIGVVFDSFK

SEQ ID NO: 1516 - protein, 245 aa, Neisseria
MALQDRTGQKVPSVVFRTRVGDTWKDVSTDDLFKGKKVVVFSLPGAFTPTCSSSHLPRYNELFGAFKENGVDAIYCVSVNDTFVMNAWAAEEESDNIYMIPDGNGEFTEGMGMLVGKEDLGFGKRSWRYSMLVNDGVVEKMFIEPEEPGDPFKVSDADTMLQFVAPDWKAQESVAIFTKPGCQFCAKAKQALQDKGLSYEEIVLGKDATVTSVRAITGKMTAPQVFIGGKYIGGSEDLEAYLAKN

SEQ ID NO: 1517 - protein, 467 aa, Neisseria
MKKIQADVVVIGGGTAGMGAFRNARLHSDNVYLIENNVFGTTCARVGCMPSKLLIAAAEARHHALHTDPFGVHLDKDSIVVNGEEVMQRVKSERDRFVGFVVADVEEWPADKRIMGSAKFIDEHTVQIDEHTQITAKSFVIATGSRPVILPQWQSLGNRLIINDDVFSWDTLPKRVAVFGPGVIGLELGQALHRLGVKVEIFGLGGIIGGISDPVVSDEANAVFGEELKLHLDAKTEVKLDADGNVEVHWEQDGEKGVFVAEYMLAAVGRRPNVDNIGLENINIEKDARGVPVADPLTMQTSIPHIFIAGDASNQLPLLHEAADQGKIAGDNAGRYPNIGGGLRRSTIGVVFTSPQIGFVGLKYAQVAAQYQADEFVIGEVSFKNQGRSRVMLVNKGHMRLYAEKATGRFIGAEIVGPAAEHLAHLLAWAHQMKMTVPQMLDMPFYHPVIEEGLRTALRDADAKLKA

SEQ ID NO: 1518 - protein, 125 aa, Neisseria
MSAKPRPVYLDLPNIRLPIPGIVSILHRISGVGLFIMLPFLLYFLSGTLSQESAFETYRAIVSHPLVKLVLIGVLWAYLHHSLAGIRFLFLDAHKGLELNTARNTAKAVFASALVLTVVLGALLW

SEQ ID NO: 1519 - protein, 113 aa, Neisseria
MVERKLTGAHYGLRDWVMQRATAVIMLIYTVALLVVLFSLPKEYSAWQAFFSQTWVKVFTQVSFIAVFLHAWVGIRDLWMDYIKPFGVRLFLQVATIVWLVGCLVYSVKVIWG

SEQ ID NO: 1520 - protein, 587 aa, Neisseria
MGFPVRKFDAVIVGGGGAGLRAALQLSKSGLNCAVLSKVFPTRSHTVAAQGGISASLGNVQEDRWDWHMYDTVKGSDWLGDQDAIEFMCRAAPEAVIELEHMGMPFDRVESGKIYQRPFGGHTAEHGKRAVERACAVADRTGHAMLHTLYQQNVRANTQFFVEWTAQDLIRDENGDVVGVTAMEMETGEVYIFHAKAVMFATGGGGRIYASSTNAYMNTGDGLGICARAGIPLEDMEFWQFHPTGVAGAGVLITEGVRGEGGILLNADGERFMERYAPTVKDLASRDVVSRAMAMEIYEGRGCGKNKDHVLLKIDHIGAEKIMEKLPGIREISIQFAGIDPIKDPIPVVPTTHYMMGGIPTNYHGEVVVPQGEDYEVPVKGLYAAGECACASVHGANRLGTNSLLDLVVFGKAAGDSMIKFIKEQSDWKPLPANAGELTRQRIERLDNQTDGENVDALRRELQRSVQLHAGVFRTDEILSKGVREVMAIAERVKRTEIKDKSKVWNTARIEALELDNLIEVAKATLVSAEARKESRGAHASDDHPERDDENWMKHTLYHSDINTLSYKPVHTKPLSVEYIKPAKRVY

SEQ ID NO: 1521 - protein, 235 aa, Neisseria
MEKMSFEIYRYNPDVDAKPYMQRYELELEPTDVKLLDALVRLKAQDDTLSFRRSCREGICGSDGMNINGKNGLACLTDLRGLKQPVKIRPLPGLPVIRDLIVDMTQFFKQYHSVKPYVVNDNPIDADKERLQTQEERKELDGLYECILCACCSTACPSFWWNPDKFVGPSGLLNAYRFIADSRDTITNERLDNLNDPYRLFRCHTIMNCVDVCPKHLNPTRAIGKIKEIMLKRAV

SEQ ID NO: 1522 - protein, 82 aa, Neisseria
MMVFDDIAKRKIRFQTRRGLLELDLIFGRFMEKEFEHLSDKELSEFSEILEFQDQELLALINGHSETDKGHLIPMLEKIRRA

SEQ ID NO: 1523 - protein, 27 aa, Neisseria
MRHLKSACRQISKCKSRLKAKNVLRMQ

SEQ ID NO: 1524 - protein, 427 aa, Neisseria
MSKSIKLNVPGQAGLELPVLEASIGHDVVDIRGLTKNTGLFSFDPGFVSTASCESKITYIDGDQGLLYYRGYPIEQLAEKSDYLEVCYLLIYGELPTPEQKAEFDNTVRRHTMVHEQLTWFFRGFRRDAHPMAMMVGVVGALSAFYQDSLDISNPEHRKIAIYRLISKIPTIAAMCYRYSNGLPFNYPKNNLSYSENFLHMMFATPCEDYKPNPVLARALDRIFILHADHEQNASTSTVRLAGSSGANPFACIAAGIACLWGASHGGANEAVLKMLDEIGDVSNVAAYMEGVKQRKYRLMGFGHRVYRNMDPRASIMRETCYEVLKELGLEDSPKFKLAMELEQIALKDPFFIERKLYPNVDFYSGIVLSALGIPTEMFTVIFALSRSVGWISHWHEMISDPSLKIGRPRQLYTGSERRDYVPPGER

SEQ ID NO: 1525 - protein, 942 aa, Neisseria
MMDEKLNFSYLFGSNAPYIEELYEAFLENPDAVDEKWKQYFTDLSKQPGTVAVDVAHTPIRESFVTLAKKKIASAVAGGADEAMLKKQVSVLRLISAYRIQGVGAAQLDPLKRIPPRDIEALDPKFHGLSDADMALQFNMGEGDFANRGKLPLSQIISNLKQTYCGHIALEYIYIPNTEERRWVRNYFESVLSTPHYNADQKRRILKEMTAAETLERYLHTKYVGQKRFGVEGGESAIAGLNYLIQNAGKDGVEEVIIGMAHRGRLNVLVNILGKKPGDLFAEFEGRAEIKLPSGDVKYHMGFSSDIATPHGPMHVSLAFNPSHLEIVNPVVEGSARAKQKRLGENGRDKVLPVLIHGDSAFIGLGVNQATFNLSKTRGYTTGGTVHIVINNQIGFTTSDIRDTRSTVHCTDIAKMVSAPVIHVNGDDPERVCFAIQAALDYRKKFHKDIVIDVVCYRKWGHNEGDDPTLTQPMMYKKVSQHPGARALYTEQLIAEGVVTQAEADGYIQAYRDALDKGEHVEQTTLSNFQRTQIDWSKYQGKDWREHIETGLPAADIERLTEKFTAVPEGFALHPTAKRVIEARKAMASGKQAIDWGMAETLAYASLVTKGHGVRISGEDSGRGTFSHRHAVLHDQKREKWDDGTYVPLRHMGEGMGEFLVIDSILNEEAVMAFEYGFACSAPDKLTIWEAQFGDFANGAQVTIDQFLSSGETKWGRLCGLTTILPHGYDGQGPEHSSARVERWLQLCSENNMQVIMPSEASQMFHLLQRQVLGSYRKPLVIFMSKRLLRFKGAMSPLENFTEGSTFRPVIGDTAERASNDSVKRVVLCAGQVYYDLEAGRAERKLEDDVAIVRVEQLYPFPYDEVKAELAKYPNAKSVVWAQEEPKNQGAFYQIRHRIEDVISEEQKLSYAGRPSSASPAVGYSSKHIAQLKQLVEDALAL

SEQ ID NO: 1526 - protein, 393 aa, Neisseria
MIIDVKVPMLSESVSEGTLLEWKKKVGEAVARDEILIDIETDKVVLEVPSPQAGVLVEIVAQDGETVVADQVLARVDTAATAAAEAPAAAPAEAAPAAAPAATQNNAAMPAAAKLAAETGVDVNALQGSGRDGRVLKEDVQNAAAKPAGAAAPAVALPAGARPEERVPMSRLRARVAERLLASQQENAILTTFNEVNMKPIMDLRAKYKEKFEKEHGVKLGFMSFFVKAAVAALKKYPVVNASVDGKDIVYHGYFDIGIAIGSPRGLVVPILRDADQMSIADIEQAIVDYAKKAKDGKIAIEDLTGGTFSITNGGTFGSMMSTPIINPPQSAILGMHATKERAVVENGQVVVRPMMYLALSYDHRIIDGREAVLTLVAIKDALEDPARLLLDL

SEQ ID NO: 1527 - protein, 477 aa, Neisseria
MSQYDVVVIGAGPGGYVAAIRAAQLGFKTACVDAGVNKAGNAPALGGTCLNVGCIPSKALLQSSEHFHAAQHEFAEHGITVGDVKFDAAKMIERKDAIVTKLTGGVKFLFQKNKVTSLFGTASFAGKNGDAYQIEVDNKGEKTVIEAKHVIVATGSVPRPLPQVAIDNVNVLDNEGALNLTEVPAKLGVIGSGVIGLEMGSVWNRVGAEVTILEAAPTFLAAADQQIAKEAFKYFTKEQGLSIELGVKIGDIKSEGKGVSVAYETAAGEAKTEVFDKLIVAIGRIPNTKGLNAEAVGLEKDERGFIKVDGECRTNLPNVWAIGDVVRGPMLAHKASDEGVAVAERIAGQKPHIDFNNVPFVIYTDPEIAWVGKTEEQLKAEGVEYKKGTSGFGANGRALAMGKAKGTVKVLADAKTDRILGVHMIGPVVSELVTEGVTALEFFASSEDIARIIHAHPTLSEVVHEAALAADKRALHG

SEQ ID NO: 1528 - protein, 95 aa, Neisseria
MNKEIVGIFFIPAGIISMCMAALWQMYVMMTETYTLNRFKDKELVWRVALLFISFSLAVYLLCPNSRKKGIVFFILGGGGAAMYLLARMWLPFSK

SEQ ID NO: 1529 - protein, 388 aa, Neisseria
MNLHEYQAKELLASYGLPVQGGILAHNGEEAAAAYDKLGGKFAVVKAQVHAGGRGKAGGVKVVKSREEAKEVAESLIGTNLVTYQTDANGQPVNSVLVCEDMYPVQTELYLGAVVDRSTRRITFMASTEGGVEIEKVAAETPEKIFKVTVDPLVGLQPCQAREVAFQLGLKDKQINEFVKLMTGAYKAFVENDFALFEVNPLAVRENGALACVDGKIGIDSNALYRLPKIAELRDKSQENERELKASEFDLNYVALEGNIGCMVNGAGLAMATMDIIKLKGGQPANFLDVGGGATKDRVVEAFKLILEDKSVQGVLINIFGGIVRCDMIAEAIVAAVKEINVNVPVVVRLEGNNAELGAKILNESGLKLTSADGLNDAAEKIVAAVNA

SEQ ID NO: 1530 - protein, 296 aa, Neisseria
MSVLINKDTKVLVQGFTGKNGTFHSEQALAYGTKVVGGVTPGKGGQTHLNLPVFNTMKEAVKETGADASVIYVPAPFVLDSIVEAVDSGVGLVVVITEGVPTLDMLKAKRYLETNGNGTRLVGPNCPGVITPGECKIGIMPGHIHTPGRIGIISRSGTLTYEAVAQTTKLGLGQSTCIGIGGDPIPGMNQIDALKLFQEDPDTDAIIMIGEIGGTAEEEAAEYIQSNVSKPVVGYIAGVTAPKGKRMGHAGAIISGGKGTAEEKFAAFEKAGIAYTRSPAELGTTMLEVLKAKGLA

SEQ ID NO: 1531 - protein, 531 aa, Neisseria
MKPLKTLEFGFVDAANYRRRENKDLFNRIFVKGEYLDELCEPNISFLIGEKGTGKTAYAVYLTNNFYKNIHATTKFVRETDYSKFIQLKKARHLTVSDFTSIWKVILYLLISNQIKCKENGILSSIFNKFKALDEAINEYYYGAFDPEIVQAITLIENSKEAAEMIFGKFVKLGEEESQQITFTESKFQANLGFIERKFKDALSQLKLKDNHILFIDGIDIRPSQIPFDEYHECVKGLANAIWMLNNDIFPSIKDSKGRMRVVLLIRPDIFDSLGLQNQNTKLQDNSVFLDWRTDYKSYRSSKIFGVFDHLLRTQQEKQDSLEKGNSWDYYFPWNAPNLHDEYKNLTSFISFLRKSYYRPRDILQMLTLLQKNKKSKEDYVVAEDFDNTSFQREYSIYLLGEIKDHLLFYYSQSDYQNFLKFFEFLNGKDRFKYSDFLKAFERLKKHLQTTSVEIPKFMSTANEFLQFLFDLNVIAYLDNPEDETKPYIHWCFKDRNYANISPKIKTETEYLIFSGLSKALDVGTPFKNKQ

SEQ ID NO: 1532 - protein, 949 aa, Neisseria
MCNHHPQHSHDNDTIRIRGARTHNLKNIDLDIPRHKLVVVTGLSGSGKSSLAFDTLYAEGQRRYVESLSAYARQFLQMMDKPDVDLIEGLSPAISIEQKSTSHNPRSTVGTVTEIHDYLRLLYARVGTPYCPEHKLPLSSQTVSQMVDAVLKLPEDTRVMILAPTVRERKGEFVDFFADLQAQGFARVRVDGEVYQLDEVPKLEKNIKHNIDVVIDRVKVKADIKQRLAESFETALRHGNERALAMEMDSGEEHWFSARFACPVCSYSLPELEPRLFSFNNPMGSCPTCDGLGNTNFFDPEKVVAHPELSLATGAIDGWDKRNQFYFQMIQSLARHYGFDVQAAWETLPEKVKKVVLHGSGKEVIDFTYLSERGTTFNRSHAFEGIIPNLERRYRETDSETVREKLREYQNHRACPSCGGARLRKEARYVYVSGEPLHEVSAWPLTKTHQFFETLDLDGNKKQIAEKILKEITERLGFLINVGLDYLNLSRSAETLSGGEAQRIRLASQIGSGLTGVMYVLDEPSIGLHQRDNDRLLATLKRLRDLGNSVIVVEHDEDAIREADFVVDMGPGAGEHGGNVLIADTPENVAQCENSVTGQYLSGKKSIAVPSERTPVNPDRMLVLKGARGNNLKNVTLELPLGLITCITGVSGSGKSTLINDTLAKITARELNRAQEEPAPFDDIHGLEHLDKVINVDQSPIGRTPRSNPATYTGLFTPIRELFAGVPLSRERGYNVGRFSFNVKGGRCEACQGDGVIKVEMHFLPDVYVPCEVCHGKRYNRETLEIQYKGKNISQVLDMTVEEAREFFDAVPTVSRKLQTLMDVGLGYIRLGQSATTLSGGEAQRVKLALELSKRDTGRTLYILDEPTTGLHFADIALLLEVIGRLKGKGNSIVIIEHNLDVIKTADWIVDLGPEGGDGGGRIIAKGSPEQVAKVKGSYTGKYLKVVLR

SEQ ID NO: 1533 - protein, 265 aa, Neisseria
MNRLYPHPIIAREGWPIIGGGLALSLLVSICCGWWSLPFWVFTVFALQFFRDPAREIPLNPEAVLSPVDGRIVVVERARDPYRDVDALKISIFMNVFNVHSQKSPADCTVTKVVYNKGKFVNADLDKASTENERNAVLATTASGREITFVQVAGLVARRILCYTQAGAKLSRGERYGFIRFGSRVDMYLPVDAQAQVAIGDKVTGVSTVLARLPLTAPQTESEPESEPALQTAPVETAANPSAEQRQIEAAAAKIQAAVQDVLKD

SEQ ID NO: 1534 - protein, 758 aa, Neisseria
MAQTTLKPIVLSILLINTPLLAQAHETEQSVDLETVSVVGKSRPRATSGLLHTSTASDKIISGDTLRQKAVNLGDALDGVPGIHASQYGGGASAPVIRGQTGRRIKVLNHHGETGDMADFSPDHAIMVDTALSQQVEILRGPVTLLYSSGNVAGLVDVADGKIPEKMPENGVSGELGLRLSSGNLEKLTSGGINIGLGKNFVLHTEGLYRKSGDYAVPRYRNLKRLPDSHADSQTGSIGLSWVGEKGFIGVAYSDRRDQYGLPAHSHEYDDCHADIIWQKSLINKRYLQLYPHLLTEEDIDYDNPGLSCGFHDDDNAHAHTHSGRPWIDLRNKRYELRAEWKQPFPGFEALRVHLNRNDYRHDEKAGDAVENFFNNQTQNARIELRHQPIGRLKGSWGVQYLQQKSSALSAISEAVKQPMLLDNKVQHYSFFGVEQANWDNFTLEGGVRVEKQKASIQYDKALIDRENYYNHPLPDLGAHRQTARSFALSGNWYFTPQHKLSLTASHQERLPSTQELYAHGKHVATNTFEVGNKHLNKERSNNIELALGYEGDRWQYNLALYRNRFGNYIYAQTLNDGRGPKSIEDDSEMKLVRYNQSGADFYGAEGEIYFKPTPRYRIGVSGDYVRGRLKNLPSLPGREDAYGNRPFIAQDDQNAPRVPAARLGFHLKASLTDRIDANLDYYRVFAQNKLARYETRTPGHHMLNLGANYRRNTRYGEWNWYVKADNLLNQSVYAHSSFLSDTPQMGRSFTGGVNVKF

SEQ ID NO: 1535 - protein, 90 aa, Neisseria
MRPREPGAEPRVLTSTPFCHLFDRSGTCRFYALINFGYPAAEHNGQTQRNLRQHQPRPRRTADTNGHRPMPQPFHLKNFCLCPLSVLKIL

SEQ ID NO: 1536 - protein, 196 aa, Neisseria
MLLFIDNYDSFTYNIVQYFTELGQEVAVRRNDDITLEEIEALNPQYLVIGPGPCSPKEAGISVAAMRHFAGRLPIMGVCLGHQTIGEAFGGRIVRAKTLMHGKVSPVSHSGKGMFKGLPNPVTCTRYHSLVIDRNTMPECLEVTAWTEDGEIMGVRHKEYAVEGVQFHPEALLTEHGHDMLNNFLIEFQNFKPQKI

SEQ ID NO: 1537 - protein, 352 aa, Neisseria
MITPQQAIERLISNNELFYDEMTDLMRQIMRGQVLPEQIAAILTGLRIKVETVSEITAAAAVMREFATKVPLENAEGLVDIVGTGGDGAKTFNISTTSMFVAAAAGAKVAKHGGRSVSSSSGAADVVEQMGANLNLTPEQVAQSIRQTGIGFMFAPNHHSAMRHVAPVRRSLGFRSIFNILGPLTNPAGAPNQLLGVFHTDLCGILSRVLQQLGSKHVLVVCGEGGLDEITLTGKTRVAELKDGKISEYDIRPEDFGIETRRNLDEIKVANTQESLLKMNEVLEGREGAARDIVLLNTAAALYAGNVAASLSDGISAAREAIDSGRAKSKKEEFVGFQPQQRCHFLGKMELG

SEQ ID NO: 1538 - protein, 29 aa, Neisseria
MIMELLWQNISTSRRELTKLFLYKNLGLY

SEQ ID NO: 1539 - protein, 57 aa, Neisseria
MLPIIRKKVKPDGIVYTDTFRSYDVLDISEFSHLRKFNGIPKEHLGLHLKKCQWHFK

SEQ ID NO: 1540 - protein, 96 aa, Neisseria; identical to SEQ ID NO: 1065

SEQ ID NO: 1541 - protein, 65 aa, Neisseria; identical to SEQ ID NO: 1064

SEQ ID NO: 1542 - protein, 94 aa, Neisseria; identical to SEQ ID NO: 1063

SEQ ID NO: 1543 - protein, 92 aa, Neisseria; identical to SEQ ID NO: 1062

SEQ ID NO: 1544 - protein, 105 aa, Neisseria
MNKPFITQAQLALYKYQPSSKYFGQSMAVIAQSEFVEFAKINKSENVIDCFSFFWNRRIKHDIWLISFSDNSEMVIKESLKDGHKIYKFEFCEIVDNCNFDDVFV

SEQ ID NO: 1545 - protein, 131 aa, Neisseria; identical to SEQ ID NO: 1060

SEQ ID NO: 1546 - protein, 157 aa, Neisseria
MTMQVFLTIPGYDVEAEIEKFVWMDAVIWQMPGWWMHEPWTVKKYIDGVLTAGHGKLYQSDGRHSVNPTEGYGTGGLLQGKKHMLSLTWNAPIEAFTREGDFFEGKGVDVLYMHFHKANEFLGMTRLPTFLCNDVVKNPQVEKYLADYQAHLEKVFG

SEQ ID NO: 1547 - protein, 461 aa, Neisseria
MSSGLVTAAYIVAAILFIFSLAGLSKQETAKQGCYSGIAGMAVALFVTVFSDNTHGLGWIIIAMLIGAAIGIYKAKKVEMTEMPELIALLHSFVGLAAVLVGFNSYIAPGNVSHDMHTIHLVEVYLGIFIGAVTFTGSLVAFGKLNGKISSSPLQLPAKHKLNALALAVSFVLLLVFVGIDGSGFILLIMTLIALAFGWHLVASIGGADMPVVVSMLNSYSGWAAAAAGFMLSNDLLIVTGALVGSSGAILSYIMCKAMNRSFVSVIAGGFGSDSGTLSSGSQEIGEYREVKAADIAEMLKGANNVIITPGYGMAVAQAQYPVAEITELLRKNGTEVRFGIHPVAGRLPGHMNVLLAEAKVPYDIVLEMDEINDDFPETDVVLVIGANDTVNPAAQTDPNSPIAGMPVLEVWKAKEVVVFKRSMNTGYAGVQNPLFFNENSVMCFGDAKKTVDDILSELKK

SEQ ID NO: 1548 - protein, 127 aa, Neisseria
MTFAYWCILIACLLPLFCAAYAKKAGGFRFKDNHNPRGFLAHTQGAAARAHAAQQNGFEAFAPFAAAVLTAHATGNAAQSTINTLACLFILFRLAFIWCYIADKAAMRSLMWAGGFACTVGLFVAAA

SEQ ID NO: 1549 - protein, 513 aa, Neisseria
MKIGIPRESLSGETRVACTPATVALLGKLGFETVVESGAGLAASLDDAAYQTAGATVADKAAVWVCPLIYKVNAPSEQELPLLNEGQTIVSFLWPRQNEALVEALRAKKVNALAMDMVPRISRAQALDALSSMANISGYRAVIEAANAFGRFFTGQITAAGKVPPAQVLVIGAGVAGLAAIGTANSLGAVVRAFDTRLEVAEQIESMGGKFLKLDFPQESGGSGDGYAKVMSDEFIAAEMKLFAEQAKEVDIIITTAAIPGKPAPKLITKEMVESMKSGSVIVDLAAATGGNCELTRPGELSVTGNGVKIIGYTDMANRLAGQSSQLYATNLVNLTKLLSPNKDGEITLDFEDVIIRNMTVTHDGEITFPPPPIQVSAQPQQTPSEKAVPAAKPEPKPVPLWKKLAPAVIAAVLVLWVGAVAPAAFLNHFIVFVLACVIGYYVVWNVSHSLHTPLMSVTNAISGIIVVGALLQIGQGNGFVSLLSFVAILIAGINIFGGFAVTRRMLNMFKKG

SEQ ID NO: 1550 - protein, 277 aa, Neisseria
MPHALVLQFPSAAALPSDFPLRLPEPDCADEKRMRFIVEEGFSLSEKDAALLGSRQIDHAVLPDMDFDELGLIVSDMDSTLITIECVDEIAAGVGLKNKVAEITERSMRGELDFEQSLRSRVALLAGLDERVLADVYENVLKLSPGAEFLLDECKRHDVKFLLVSGGFTFFTERLQQRLGFEYQHANVLEIENGRLTGRLKGRIIDAQAKADLLREYRSRLGLQPHQVLAVGDGANDIPMLKEAGIGVAYRAKPKARAAADACINFGGLERVRGLFG

SEQ ID NO: 1551 - protein, 380 aa, Neisseria
MHFIQHTAYGYGADGVYTSFREGVAQASGMRRVAVLTLCGAVAGSGWWLLKRFGKPQIEIKAALKQPLQGLPFLTTVFHVLLQIITVGLGSPLGREVAPREMTAAFAFAGGKRLGLDEGEMRLLIACASGAGLAAVYNVPLASTLFILEAMLGVWTQQAVAAALLTSVIATAVARIGLGDVQQYHPANLTVNTSLLWFSAVIGPILGVAAVFFQRTAQKFPFIKRDNIKIIPLAVCMFALIGVISVWFPEILGNGKAGNQLTFGGLTDWQHSLGLTAVKWLVVLMALAVGAYGGLITPSMMLGSTIAFAAATAWNSVFPEMSSESAAIVGAAVFLGVSLKMPLTAIAFILELTYAPVALLMPLCTGMAGAVWVAKKMGFK

SEQ ID NO: 1552 - protein, 526 aa, Neisseria
MSSIKRALISLSDKTGAVEFAQTLHKLGVEILSTGGTAKLLADAGVPVIEVADYTGFPEMLDGRVKTLHPKIHGGILGRRDLDEHVAKMEEHGIGNIDLVCVNLYLFAATIAKPNCTLEDAIENIDIGGPTMVRSAAKNWKHVAIVTDTADFPAIAAELEANNGALSDKTRFNLSRKAFSHTAQYDGMISNYLTSLSDDVLSGTPEIAGFPGRFNQSWIKVQDMRYGENPHQRAAFYRDIDPAAGSLAAYKQLQGKELSYNNIADADAAWEAVKSFDVPACVIVKHANPCGVAIASNTLDAYKLAYATDTTSAFGGIIAFNREVDGATVKQITDNQFMEVLMAPKFTAEALEIAAAKKNVRVLEVPLEAGANRFELKRVGGGLLVQTPDIHRISRADLKVVSKRQPTEQEWNDLLFVWNVAKYVKSNAIVFGKGGQTYGIGAGQMSRVDSTRIAARKAQDAGLDLNGACAASDAFFPFRDGVDVIAEQGIKAIIHPAGSMRDQEVFDAADEHGIAMVVTGIRHFRH

SEQ ID NO: 1553 - protein, 165 aa, Neisseria
MSVRFAKNIGLILYIVFYGFEMRRALIAKIKIAQKELGLDDGTYRAVLERVTGKRSCADMDVSELESVVADMRSHGFKPKAKGNPHGKPHLRRTSSAAMLDKVEALLTVGGKHWNYAHAMARRMFGKDKVEYLDDTQLHKLVAALQIAENRKTEKAGGDDGVRKS

SEQ ID NO: 1554 - protein, 143 aa, Neisseria
MMGFEKVEHLLPDTVLDIVDVIGLAATEQLVKAIGGARFKFGKGKVDTERLAILVEAIGEVKTHELLQVYGGEELYVPRCGKALIQLRNHRFYQEFVKLRDIDKKSGLMAMTKLCPKYGISSRTGYTIINEMSRPAAQQAALF

SEQ ID NO: 1555 - protein, 181 aa, Neisseria
MGKTVTLTAGHSNTDPGAVNGSDREADLAQDMRNIVASILRNDYGLTVKTDGTGKGNMPLRDAVKLIRGSDVAIEFHTNAAANKTATGIEALSTPKNKRWCQVLGKAVAKKTGWKLRGEDGFKPDNAGQHSRLAYAQAGGIVFEPFFISNDTDLALFKTTKWGICRAIADAIAMELGAAKV

SEQ ID NO: 1556 - protein, 67 aa, Neisseria
MKKSLIALCVAHCAKLKNDFGVPPLPEIKITPSPVRVGSLKQHPSLRLGKSGVAAAKRAARKRKNRR

SEQ ID NO: 1557 - protein, 54 aa, Neisseria
MGQVAFYEKMIGLWSAKSREASEQADLAAFEFAEGELANYREMLKRHLQTKSVE

SEQ ID NO: 1558 - protein, 134 aa, Neisseria
MNLVKLLANNWQPIAIIALVGTGLAVSHHQGYKSAFAKQQAVIDKMERDKAQALLLSAQNYARELELARAEAKKYEVKAHAVGMALAKKQAEVSRLKTERDLCKIPFPPDSRNPNTGFRLFSPQIPPNFTQIPP

SEQ ID NO: 1559 - protein, 370 aa, Neisseria
MSTFFRQTAQAMIAKHINRFPLLKLDQVIDWQPIEQYLNRQKTRYLRDHRGRPAYPLLSMFKAVLLGQWHSLSDPELEHSLITRIDFNLFCRFDELSIPDYSTLCRYRNWLAQDDTLSELLELINCQLTEKGLKVEKASAAVIDATIIQTAGSEQRQAIEVDEEGQISGQTTPSKDSDARWIKKNGLYKLGYKQHTRTDAEGYIEKLHITPANAHECKHLSPLLEGLPEGTTVYADKGYDSAENRQHLEEHQLLDGIMSKACRNRPLSEVQTKRNRYLSKTRYSGLNLNQDKATKPQTVQIVRQGEATPYWFKFNPLYVVEQSFGTLHRKFRYARAAYFGLIKVSAQSHLKAMCLNLLKAANRLSAPAAA

SEQ ID NO: 1560 - protein, 591 aa, Neisseria; identical to SEQ ID NO: 448

SEQ ID NO: 1561 - protein, 56 aa, Neisseria
MAQYMCGPCGWIYDEEHGDPEHGIAPGTKFEDIPDDWKCPECGVGKEDFYLLDFVI

SEQ ID NO: 1562 - protein, 363 aa, Neisseria
MNAQTLIANVAEFVKTKLKPIVDDIDRKGYYPEAFMRELGAIGGFGAVGTEAEGGNGLGLATQIAVLREIGKECGATSFSAWCQAACAWYLHQTPNRAVKDKYLADILQGKVLAGTGMSNTVKHLADIEKHNLQAERVEGGYTVNGALPWVSNIGEDHIWANTAQIGDGYVMFITGGQWEGVSLQNCPEFCALEGTRTFSLNFKDVFIPDEDIIAAPEQFADYIQSIKAGFILLQIGIGAGVIDGSLGIIRLANVVNAEVNNYLNDGYDSLKTRLDGAWAETERLAGLAWSGTPDNLATLKLREAAAVLALAAAQSAALHSGAKGYLMRSPAQRRVREAMFVAIVTPAIKHLRKEIAAIEAAK

SEQ ID NO: 1563 - protein, 227 aa, Neisseria
MPSEKCSDGISYNLLFAAHNQSVFPIPFRNAYHAPVPNICEQGKKMARLTVHTLETAPEAAKARVEAVLQNNGFIPNLIGVLSNAPEALAFYQEVGKLNAANSLTAGEVEVIQIIAARTNQCGFCVAGHTKLATLKKLLSEQSVKAARALAAGEFDDAKLGALAAFTQAVMAKKGAVSDEELKAFFDAGYNQQQAVEVVMGVALATLCNYVNNLGQTEINPELQAYA

SEQ ID NO: 1564 - protein, 123 aa, Neisseria
MKPYKIYTHPALPPQAVKQGWSWPGLLFGTLWACFKRMWGLGLGLTGAIFVLAVFAQLVYGDTPATDSAFNVLGLAVSVWFGAKGNSLYARHLLSRGYTELPETVEAANPQAALAQYFGRGGR

SEQ ID NO: 1565 - protein, 563 aa, Neisseria
MSASQLLSRLTQTVGEKYIITDPAKTEQYRQGYRFGEGKALAVVRPGSILEMWKILQACVEADVIVITQAANTGLTGGSTPDGNDYDRDIVIVNTMRMNIIQTINNNEQVVCLPGSTLNQLELLLKPLGREPHSVIGSSCIGASVLGGVCNNSGGALVQRGPAYTEMALFAQINEEGRLELVNHLGIDLGNTPEEILTNLQGHHYQNKDITQDAGKGHDHAYCEHVRQVDEPTAARFNADPARHYEASGCAGKLMVFAVRLDTFPQEKQTAVFYIGTNDINELTDIRRAALGEFESLPVSGEYIHRHAFDIADVYGKDTFYVIKKFGTHQLPKLFDLKARVDRFGKKVSFLPKHFSDKAMQFVSKFLPDHLPKSMRDYRDKYEHHLILKMGGKGVDEARAFLKEYFAHHGGAFFECNAEETQAAMLHRFAVASAAIRYRAVHDDEVEDLVALDIALRRDDRDWFEKLPPEIDNKIIHKLYYGHFMCHVFHQDYIIKKGNDCMALEHEMLHLLDQRGAQYPAEHNVGHLYEAKPALKQFYRKLDPTNSFNPGVGKTSKKKNWAE

SEQ ID NO: 1566 - protein, 1277 aa, Neisseria
MTTTTAPQRIREIPYNYTSYTDREIVIRLLGDEAWQILQDLRGQRKTGRSARMLFEVLGDIWVVVRNPYLVDDLLEHPKRRAALVREMRHRLNEIRKRRDDNRQVDVLVAAAEKAVERFDSSFDETSQKRRQILERLSKITKPHNIMFDGLARVTHVTDATDWRVEYPFVVVNPDTEAEIAPLVRALIELDLVIIPRGGGTGYTGGAIPLDANSAVINTEKLDKHRGVEYVELAGLDGKHPIIRCGAGVVTRRVEETAHQAGLVFAVDPTSADASCVGGNVAMNAGGKKAVLWGTALDNLAYWNMVNPQGEWLRIERVRHNFGKIHDEETAVFDVHTLDSDGINIVKTERLEIPGHKFRKVGLGKDVTDKFLSGLPGVQKEGTDGIITSVAFVLHKMPKYTRTVCMEFFGTVATATPSIVEIRDFLLAHESVRLAGLEHLDWRYVRAVGYATKAAGKGRPKMVLLADVVSDDEAAVEAAAEHICELARARDGEGFIAVSPEARKTFWLDRSRTAAIAKHTNAFKINEDVVIPLERLGEYSDGIERINIELSIQNKLKLCAALEQYLSGKLPIDKMGTDLPTAELLGERGKHALAHVSAVKTRWEWLLANLDTPLADYKARYGAAVHAAPEAKNNESCFIAFRDFRLRVSVKADVMKPLSEIFSGKTDTKIIQGLGKIHAKTVRSRVFVALHMHAGDGNVHTNIPVNSDDAEMLQTAYRSVERIMKIARSLNGVISGEHGIGITKLEFLSDEEMQPFWDYKNQVDPKHTFNRHKLMKGSDLRNAYTPSFELLGAESLIMEKSNLGTIADSVKDCLRCGKCKPVCSTHVPRANLLYSPRNKILGVGLLIEAFLYEEQTRRGVSIKHFEELMDIGDHCTVCHRCVKPCPVNIDFGDVTVAVRNYLADSGHKRFAPAAAMGMAFLNATGPKTIKALRAAMIQIGFPAQNFAYKIGKLLPIGTKKQKAEPKATVGKAPIKEQVIHFINRPLPKNVPAKTPRSLLGIEDGKSIPIIRNPAAPEDAEAVFYFPGCGSERLFSQIGLAVQAMLWHVGVQTVLPPGYMCCGYPQDAGGNKAKAEEMSTNNRVAFHRMANTLNYLDIKTVVVSCGTCYDQLEKYRFEEIFPGCRIIDIHEYLLEKGVKLDGVKGQQYLYHDPCHTPIKTMNATQMASSLMGQKVVLSDRCCGESGMFAVKRPDIATQVKFRKQEEIEKNLKELPQGEPVKMLTSCPACLQGLSRYADDNNMPADYIVIEMAKYILGENWLDEFVKKANNGGVEKVLL

SEQ ID NO: 1567 - protein, 333 aa, Neisseria
MIDRQTNEPKQKTRIILAPMQGLVDDVMRDLLTRIGGYDECVSEFVRITHTVHSRSIWLKYVPEIANGNKTFSGTPCTVQLLGSDADNMAANALEAVRFGANKIDLNFGCPAPTVNKHKGGAILLKEPELIFHIVKTLRGRLPAHIPLTAKMRLGYEDKSRALECACAIAEGGACGLTVHARTKAEGYEPPAHWEWIRKIRDSVNIPVTANGDVFSLQDYIGIKTISGCNSVMLGRGAVIRPDLARQIKQYENGGPVKDTDFAEVSKWIRQFFELCLTKEANNKYPLARLKQWLGMMKKEFAAAQNLFDRVRTVKDADEVRNILAEFEREMNT

SEQ ID NO: 1568 - protein, 190 aa, Neisseria
MGKPGKSSRPSALLSARWQDIDLTARLWHIPAADMKTKHPFTVLLSDWAVEILRELHTQTGDNIHLFPGIRPRRKPAPHPDHISIKFAHNAIRRLGYDGSTPGKSKHTMHGFRHLFTNISLTAGKDTLTTDLALGHISRAALQRAGFSSLHHYLTADSYRLQERRELAEWYSRRHRQAYEAAAQNTCNKT

SEQ ID NO: 1569 - protein, 291 aa, Neisseria
MNTEIEIIATDKVSNQAAMRSVLVMEQWGNGETYSEERWVERGRQAVRQTMEGMFELGRALIILKEHTEHGRFMEIVKSQFGLGIAETSRLMSATRRFATPQMQKAAPKLMDLGKSKLLELLVEEDVTLVGLAEGEEVNGMTFDDVDRMTVRELRVALRESRENLAAKDEVMKTKTAKIDELAEKLAKKQTVVREPKAEDVGSELAMQLTSLEVGIRSQVSRLKDLFDQLNAHSEAHGISHQAKMVGTLNQIILDCEQLRESYALPTEAPTDNVPEWLGGETGEGDESGND

SEQ ID NO: 1570 - protein, 98 aa, Neisseria
MRMAESKRVQRLLRVFIALDEHPIIGLSNKDLSVGLGLTPSQVSRDIDDLVASGLVIKLENGNYAYGIKTLQIAERFRQQHERLQSKIAEIGKRVDVD

SEQ ID NO: 1571 - protein, 81 aa, Neisseria
MINHECINQPYGRILKFSRVQAKEMLTADELKENFAKNGQTLAQWARENGFKPRDVYLVIGGQRKGNYGKGHEIAKKLGLK

SEQ ID NO: 1572 - protein, 74 aa, Neisseria
MEKPLNFKPISYPQTRESAAGWFKRNGVCKAHWAKYFNLERTTVEHLLRGKLKGNFGKSHEAAVLLGMKEKSDD

SEQ ID NO: 1573 - protein, 59 aa, Neisseria
MNTLKAHARQLMMDHIHPATRKSLFTLKQAKTLLLHNRPDVYRAKRPKNKHIISHERHK

SEQ ID NO: 1574 - protein, 123 aa, Neisseria
MNNSSFFGNRLKEERKKLKMTQAEIAEKCGVSGRMWGDYERGISQPKAELFFQFEKVGIDVQYVMHGRRGETAVMPSETLNAEEQELLVLFREAAAADREMILMVARRAEKKAQTALGKVSNG

SEQ ID NO: 1575 - protein, 207 aa, Neisseria
MDQFELCQKEHVNPFALSKQYLLVVTFVKSSSKNFQAALLWARSAKLFENLEIGKETIYCCAFDKTAEQAGMAGVFLNYIENWNGKQIYINGRIHSGSIYDLLGVLDCYQKSQSCPNPKSHCCFVSDDIFLWHGSRPTFEISLDLTGKKKETSSAKKFVMPCINFRHHRIEKETYLGNWNEQIAALAVKQNIDWCPSFDIENFRQYE

SEQ ID NO: 1576 - protein, 64 aa, Neisseria
MNNYYLYRNCSSDVLWVKRIQRQIDGSLLLISDNSTYPPMPLALAEHPDIQIIGQVVQVSKDLN

SEQ ID NO: 1577 - protein, 187 aa, Neisseria
MKILALLIAATCALSACGSQSEEQPASAQPQEQAQSELKTMPVSYTDYQSAANKGLNDQKTGLTLPEHVVPIDNAEGKNLLHDFSDGLTILTVDTDKADKITAVRVVWNTDAMPQKAEKLSKAAAALIAATAPEDRTMLRDTGDQIEMAIDSHNAQKEPTREWARGGIAYKVTVTNLPSVVLTAKAE

SEQ ID NO: 1578 - protein, 315 aa, Neisseria
MMIEKSISIVDGKEYSVFAVSHEFRYTFDEPILVADLISSLKAYETLTSSYLPAILNQLFDVKIQKIKVAVSEIERGSFLEKLIFNLFFKDEDAYNEFCLKIRKFLGTENQDGSINMSKIIMFAMTTLLGVGAGYLLFKNPPQEKQAITNNIVTVINADSSVALDGEHLVSVVKEVTGSSKQKTAENVAKVYAPASKNNGSITLGTDDVRIEPVAQQTVATLPKDVDLRDTPLTEDYTDIDVQIRATDRDKNSGWYAVIDQIVPSRVRLELPEDIDLNRLANNATIRANVTVEFDLKQNGSRKPKKIILTSLSTD

SEQ ID NO: 1579 - protein, 167 aa, Neisseria
MSDKFNQFINRVLSHEGGYANHPKDPGGETNWGITKRTAQANGYNGSMRAMTREQAISIYRKAFWERYRADQMPEAVAFQFFDACVNHGYGNAARMLQRAAGVPDDGVIGAVSLKAINSLPENDLLLRFNAERLVFYTKLGTFTSFGKGWVRRVAQNLIHASADNTD

SEQ ID NO: 1580 - protein, 57 aa, Neisseria
MSKKSLIALMTAAMQPDFSHSDLGIRYAMPTQGCWTQAHRKSGVAAAKRAAKKKRHK

SEQ ID NO: 1581 - protein, 197 aa, Neisseria
MGKRRRSRHDLEVRAGGGRARMALVGLWRIGRRVCINQTRHRGDSAVGRNQKIRKSGRGAAMIEFVRAKKRLLWAFVLLLVWTCGYRYAADKAEAKQTALIATYRHSSMVAAEQYALQLKKAQDERQRWYDFSQKQGRKPVKKQYPPQTKKAGYLKTKEELLAELACLKAEMVALKKPDALIHGKEVRQKERNSSQG

SEQ ID NO: 1582 - protein, 201 aa, Neisseria
MNTDFQNILKQLGKQAQKEAAEKQAAEKNKQKQEQDFDFSQAVGQLSPLKNRQQYYAPPDKTPIKVRPKDNRADEENYFYIGSTYNDPPASFSKNGQGKNDIQRLKNGYYPVVTDVDLHGYTQEEAQKVLNEFIAFTQKRGVCGEIIHGSGLGSKGYKPVLKNMTRNWLMQHPDVLAYAEPREGNDGCVRILLKRKLRQQD

SEQ ID NO: 1583 - protein, 351 aa, Neisseria
MKTYAPALYTAALLTACSPAADSNHPSGQNAPANTESDGKNITLLNASYDVARDFYKEYNPLFIKTYQSEHPGTSVSIQQSHGGSSKQALSVANGLQADVVTMNQSSDIDLLEKKGLVEKGWQQALPDHAAPYTSTMVFLVRKNNPKQIRDWNDLAKDGVNIVIANPKTSGNGRYAFLGAYGYGLKTTNGNEQEAQKLVASILKNTPVFENGGRAATTTFTQRNIGDVLITFENEANYVSKKLTQGQFEIVYPSYTISAESPVAVVNSVVAKKGTQKTARAYLEYLWSEPAQELAASLYLRPRNPEVLARHKADFPDLDTFSPEKKFGGWDNIMKTYFADGGIFDRLTAQK

SEQ ID NO: 1584 - protein, 160 aa, Neisseria
MSLLTLLRPATVQDCKDIFKVHLHSVQYTCILSYNEHALKVWEGLLNTESYLPTISDPDKALWVAEYKGNIQGFFQIDCQEAQLDALYVHPLFHNLGLGTALLHQAETIAHKSGLSFLKLYASLNSVPFYLLNRYESLGSAVLQLDPSIKIKCELMRKHL

SEQ ID NO: 1585 - protein, 378 aa, Neisseria
MKNISLSPPAMLGILGGGQLGRMFTVAAKTMGYKVTVLDPDPDAPAAEFADRHLCAPFNDQAALDELAKCAAVTTEFENVNADAMRFLAKHTNVSPSGDCVAIAQNRIQEKAWIRKAGLQTAPYQVVCKAEDITEASAQFLPGILKTATLGYDGKGQIRVKTLDELKAAFAEHGGVDCVLEKMVDLRSEISVIVCRLNNDNVQTFDPAENIHENGILAYSIVPARLSADVQQQARQMAQRLADELDYVGVLAVEMFVVGDTHELVVNEIAPRPHNSGHHTIDACAADQFQQQVRIMCNLPPADTKLLSSCCMANILGDVWQEDGGEPDWLPLQSHPNAHLHLYGKKTAHKGRKMGHFTVLTTDSDTAFQEAKKLHQSL

SEQ ID NO: 1586 - protein, 181 aa, Neisseria
MTYEKLYELRQTLRPTTKDGLYTDNEKNREILTVRWSGNTENPKNFSAVAIGINPSKANDERSDKTLTQLARFLDMYGFTNFKMLNIFSSYSTQQTGIRANTQTDFSKFKGCLEDADMIILAWGTDRGAYKDEKNRILEFLKAEKFMEKVFCISETGNSSDTRHPSRISYSYQLVQFEESA

SEQ ID NO: 1587 - protein, 491 aa, Neisseria
MISKQEYQAQAAQGYNRIPLVQELLADLDTPLSLYLKLANRPYTYLLESVVGGERFGRYSFIGLPCSHYLKASGKHVDVYQNGEIVEQHDGNPLPFIEAFHNRFKTPEIPSLPRFTGGLVGYFGYETIYNFEHFAHRLKNTTKADPLGTPDILLMLSQELAVIDNLSGKIHLVVYADPSQPDGYERARERLEDIRTQLRQSCAIPLSLGSKHTEAVSEFGEEPFKACVNKIKDYIFAGDCMQVVPSQRMSMEFTDSPLALYRALRTLNPSPYLFYYDFGDFHIVGSSPEILVRRERNDVIVRPIAGTRLRGKTPAEDLANEQDLLSDAKEIAEHVMLIDLGRNDVGRISKTGEVKVTDKMVIEKYSHVMHIVSNVEGRLKDGMTNMDILAATFPAGTLSGAPKVRAMEIIEEVEPSKRGIYGGAVGVWGFNNDMDLAIAIRTAVVKNNTLYVQSGAGVVADSDPASEWQETQNKARAVIHAAQMVQEGLDK

SEQ ID NO: 1588 - protein, 321 aa, Neisseria
MSYTQLTQGERYHIQYLSRHCTVTEIAKQLNRHKSTISREIRRHRTQGQQYSAEKAQRQSQTIKQRKRQPYKLDSQLIQHIDPLIRRKLSPEQVCAYLCKHHQITLHHSTIYRYLRQDKSNGSTLWQHLRICSKPYRKRYGSTWTRGKVPNRVGIENRPAIVDQKSRIGDWEADTIVGKGQKSALLTLVERVTRYTIICKLDSLKAEDTARAAVRALKAHKDRVHTITMDNGKEFYQHTKITKALKAETYFCRPYHSWEKGLNENTNGLIRQYFPKQTDFRNISDREIRRVQDELNHRPRKTLGYETPSVLFLNLFQPLIH

SEQ ID NO: 1589 - protein, 319 aa, Neisseria
MSKKTKQELENNKLSKRLRHAVGDAINDFNMIEPDDKIMVCLSGGKDSYALLDILRQLQASAPIDFQLVAVNLDQKQPGFPEEVLPTYLESIGVPYKIVEEDTYSTVKRVLDEGKTTCSLCSRLRRGILYRTAKELGCTKIALGHHRDDILATLFLNMFYGGKLKAMPPKLVSDNGEHIVIRPLAYVKEKDLIKYAELKQFPIIPCNLCGSQPNLQRQVIGDMLRDWDKRFPGRIESMFSALQNVVPSHLADTELFDFVGLERGQSLKHGGDLAFDSEKMPERFSDGSEEDESEIKIEPQKAERKVINILANKPKTCGS

SEQ ID NO: 1590 - protein, 288 aa, Neisseria
MMKTLLPFFGVVRVSGEDRQTFLHGQLSNDINHLQTGQACYATYNTPKGRVIANMIVVNRGGDLLLIMAQDLLEATVKRLRMFVLRAKAVFEILEDYAVGAELEASAEPLAAQEPSLAFTAECGSDGICSVVLPHRGILHIAPKNALPPYDAAAENAWRLHEIRSGYPWICAATKETAVAQMLNQHIIGGVHFKKGCYPGQEIIARAQYRGQVKRGLAVLSGNSAVEAGTLLTADGEEAGIVLDSVQDSENFTALTVIKFSAAQKTLTVPNGGIFKAVHLFFKTENAE

SEQ ID NO: 1591 - protein, 120 aa, Neisseria
MDIRYFGTTPRYSEAVGANGLIFLSGMVPENGETAAEQTADVLAQIDRWLAECGSDKAHVLDAVIYLRDMGDYAEMNGVWDAWVAAGRTPARACVEARLARPEWRVEIKITAVKRDAATA

SEQ ID NO: 1592 - protein, 159 aa, Neisseria
MSKHTYPITPAVRVLRENGIEFEPFTYAYEEHGGTAQFARLFGKDEHLVIKTIVLQDENGKGLIVLMHGDKQISTRNLARHLGAKHIEPATPVQANKWTGYLVGGTTPFGIRTKLDIYVEQSVMDLETIYINGGKRGFIIGIRPGDLNILNPKTIQAAV

SEQ ID NO: 1593 - protein, 240 aa, Neisseria
MDKDLYAVLGVSPQAGADEIKRAYRKLAMKYHPDRNPGNPKAEEKFKEIQRAYDTLSDLSKRMQYDASFRRHEERGRQEEAFRREQARREQFYREQMRREQAFRQAFERQASRSCHTYEPSGGGSGRNYVLAAYILFGLGAIMLFMPIVGVIFAYMPIVGVILAYMKRNSLDSIVYAAHTEYLIKTFWRTFWLYILGALTALLGIGVLIIIATNVWYFYRIIAGFIRFNGGRAVAPEKWI

SEQ ID NO: 1594 - protein, 291 aa, Neisseria
MAYLLISIVFSVSVSILLKMARKKKIDIAQAVAVNYVVAVILTLLVLKPDIGNIGAFLPTWPLFAALGVLLPSVFVIMGKSVEAAGIVKSDAAQRLSLFLPIVAALTLFGEKLSEGKLIGLCLAFAALFCLLWKHSGGKKSGSAWRQAALLLGVWAGYGIIDILFKQLAKSGTAFAGNLLVAFVLAGVLMFACLFAKSVRWRVESVVGGIFLGGLNFMNIVTYITAHQMMKDNPTLVFAGMNIGVIVLGTLSGALFFKEKINTINTAGIVLALCSIACLFYWGEVKVLFGI

SEQ ID NO: 1595 - protein, 465 aa, Neisseria
MTVRIEHDLLGDREIPAEVYWGIHTLRAIENFKISTQKISDVPQFVRSMVMVKKATAQANGELGAVKPEIAAAIEKACDEVLLNNRCLDQFPSDVYQGGAGTSVNMNTNEVIANLALEVLGYEKGRYDIVNPMDHVNASQSTNDAYPTGFRLAVYYSIGELLDKLTVLKNAFAAKAEEFKDVLKMGRTQLQDAVPMTAGQEFQSFQVLLEEEILNLDRTRQLLLEVNLGATAIGTGVNTPKGYAELVVKKLSEVSGLPCKLTENLIEATSDCGAYVMVHGALKRTAVKLSKICNDLRLLSSGPRAGLKEINLPELQAGSSIMPAKVNPVIPEVVNQVCFKVIGNDTTITFAAEAGQLQLNVMEPVIAQCMFETISLLGNAAVNLSDKCVKGITVNREICERYVFNSIGLVTYLNPYIGHHNGDLVGKICAQTGKGVREVVLERGLLSEEELNRILSPENLMNPHL

SEQ ID NO: 1596 - protein, 187 aa, Neisseria
MKKIIFAALAAAAISTASAATYKVDEYHANARFAIDHFNTSTNVGGFYGLTGSVEFDQAKRDGKIDITIPIANLQSGSQHFTDHLKSADIFDAAQYPDIRFVSTKFNFNGKKLVSVDGNLTMHGKTAPVKLKAEKFNCYQSPMEKTEVCGGDFSTTIDRTKWGMDYLVNVGMTKSVRIDIQIEAAKQ

SEQ ID NO: 1597 - protein, 356 aa, Neisseria
MTKHIAILRGDGIGPEIVAETVRVLDKLIAQGLDAGYEYAPLGGEAYDEYGHPYPEFTQNLCRKADAVLLGAVGSPQYDNLDRPLRPERGLLAIRKDLNLFANLRPAVLYPELANASTLKPEIVAGLDILIVRELTGDIYFGEPRGIRVLENGEREGYNTMKYSESEIRRIAHVAFQSAQKRSKKVCSVGKANVLETTELWREIFEEIGKEYPDVELSHMYVDNAAMQLVRAPKQFDVIATGNIFGDILSDEASMLTGSIGMLPSASLDENGKGLYEPSHGSAPDIAGQNKANPLATILSLAMLLRYSLNDEARAQQVENAVQKVLQQGLRTSDIYEEGTKLVSCSEMGDAVLAAL

SEQ ID NO: 1598 - protein, 243 aa, Neisseria
MVKLTAQQIFDKLLNEEKILSVNGQIRFFLGDVDIIVKQKDVVGNIIQEWLGGWLRKREIEFDVSTNTQMPPDFFLNKKDRSRELLEVKAFNRNASPGFDIADFKMYSDEIIHKPYMLDVDYLIFGYDMDDNGNVTIKDLWLKKVWQITRSMDGWAINLQVKKGVVHKIRPGVWYSINKKNMPMFECLEDFVSAIEETVYQNPATRHNASLWKKKFEEAYKKHYNRSISIPRWHEIAHKYKKK

SEQ ID NO: 1599 - protein, 423 aa, Neisseria
MQQIKFIDLFSGMSGIRKGFEQACRKQSVACECVFTSEIKPAALEVLKQNYPDEVPYGDITKIETGDIPDFDILLAGFPCQAFSFAGKRLGFEDTRGTLFFDVARILKAKKPKGFILENVEGLVTHDRKDPTQKIGRTLTVILETLETLGYYVSWKVLNAKDFGIPQNRKRIYLTGSLKSKPDLSFETTLSPKLKNILESGLPTESSPFIKKLLKKFPPSELYGKSVKDKRGGKNNIHSWDIELKGTVTEEEKQLLNMLLKERRKKKWASEIGIDWMDGMPLTKAQISTFYKHPNLQNILDSLTDKGYLVLEHPKQKIGGRRIKDESLPKGYNIVSGKKSFEINKILDPNDVAPTLVAMDMEHLFVVDNGGLRTLTGKEGLRLFGYPDDYSFDIPKKDKYDLLGNTVAVPVIKAVSERLLHTL

SEQ ID NO: 1600 - protein, 213 aa, Neisseria
MKAFTKITAIVAPLDRSNVDTDAIIPKQFLKSIKRSGFGPNAFDEWRYLDHGEPGMDNSKRPLNPDFSLNQPRYQGAQILLTRKNFGCGSSREHAPWALDDYGFRAVIAPSFADIFFNNCYKNGLLPIVLTEERVDRLFKEVEANEGYQLSIDLAEQTLTTPSGETFTFDITEHRKHCLLNGLDEIGLTLQHADEIHAFEEKRRQSQPWLFNG

SEQ ID NO: 1601 - protein, 84 aa, Neisseria
MNKLFITALSALALSACAGTWEGAKQDTARNLDKTQAAAERAAEQTGNAVEKGWDKTKEAVKKGGNAVGRGISHLGGKIENATE

SEQ ID NO: 1602 - protein, 469 aa, Neisseria
MTAQTLYDKLWNSHVVREEEDGTVLLYIDRHLVHEVTSPQAFEGLKMAGRKLWRIDSVVSTADHNTPTGDWDKGIQDPISKLQVDTLDKNIKEFGALAYFPFMDKGQGIVHVMGPEQGATLPGMTVVCGDSHTSTHGAFGALAHGIGTSEVEHTMATQCITAKKSKSMLISVDGKLKAGVTAKDVALYIIGQIGTAGGTGYAIEFGGEAIRSLSMESRMTLCNMAIEAGARSGMVAVDQTTIDYVKDKPFAPEGEAWDKAVEYWRTLVSDEGAVFDKEYRFNAEDIEPQVTWGTSPEMVLDISSKVPNPAEETDPVKRSGMERALEYMGLEAGTPLNEIPVDIVFIGSCTNSRIEDLREAAAIAKDRKKAANVQRVLIVPGSGLVKEQAEKEGLDKIFIEAGFEWREPGCSMCLAMNADRLTPGQRCASTSNRNFEGRQGNGGRTHLVSPAMAAAAAVTGRFTDIRMMA

SEQ ID NO: 1603 - protein, 449 aa, Neisseria
MKLPVMSPEHSAQLQAFEAKILSNHAKIEAWFRTQWSVHRPPFYGSVDIRNAGYKISSIDMNLFPGGFNNLNPNFIPLAAVAAQDAVQRACETAKSVLIIPENHTRNTFYLQNVYALGEILRSAGYEVRLGSLNPEVTEPTEFETALGDKILLEPLLRTRDRVHLADGFSPCVVLLNNDLSAGIPDILKGISQTVLPPLHGGWTTRRKTNHFGAYNQVTAEFAKLIGIDEWQINPYFEKIGGLDFQGREGEDALAEAVERVLAKIQAKYDESGITDKPFVIVKADAGTYGMGVMSVKSADEVRGLNRKNRNKMAKVKEGLEVSEVIVQEGIYTYETLNGAVCEPVVYMMDRFVIGGFFRVHEGRGADENLNAGGMVFVPLSNSIPTGNGDNSQEAPEACKRVFEQWDSLGMPRSEKDCDVDNEHNRLYVYGVMARLSLLAASIELEETA

SEQ ID NO: 1604 - protein, 225 aa, Neisseria
MSIKQWPEGERPREKLLERGAAALSDAELLAILLRVGTRGMSAVDLARYLLQEFGSLGRLMSAEVGKLSAYKGMGTASFTQFAVVREIGRRILAEELQESIVLSDPDTVADYLRFHLGQEKVEVSVALLLNRQNQLIAVRELSRGTVAENTIYIREIVKLALDEYADSLIIAHNHPGGSPEPSQEDIMFTRRLAQAMSLVDVSLLDHFIVTSQSVCSFRQLGLMP

SEQ ID NO: 1605 - protein, 241 aa, Neisseria
METQNKPTVTDIDRPILVPPGGHKKVLLHSCCAPCSGEVMEAMLASGIDYTIYFYNPNIHPHKEYMLRKEENVRFAEKFGIPFIDKDDDYENDRKEWFAKAKGMEFEPERGIRCTMCFDMRFEKAAQYAHEHGFPVFTSSLGISRWKNMAQINDCGHRAAAPYDDVVYWDFNWRKGGGSARMIEISKRENFYQQEYCGCAYSLRDSNAHRKSQGRIPIKLGVLYYGDESTQYEPAPIRVDK

SEQ ID NO: 1606 - protein, 426 aa, Neisseria
MKSLFIRLLLLGSAAGVFYHTQNQSLPAGELVYPSAPQIRDGGDALHYLNRIRAQIGLHKLAHAPVLENSARRHASYLTLNPEDGHGEHHPDNPHYTAQKLTERTRLAGYLYNGVHENISTEEEAAESSDSDIRTQQRQVDGLMSAIYHRLSLLDRHTDEAGAAFVRENGKTVLVFNQGNGRFERHCAQGRNQPEAGRKYYRNACHNGAVVYTDEAMPAQELLYTAYPVGSGALPYFHGERPDPVPEYEITGNPASIDFSEAAGKITMKSFKLYQGKNEIRPVRVLTAGNDPNGRLTAYQFALFPLKPLEYGTLYTAVFDYVRNGRRAQAKWQFRTRKPDYPYFEVNGGETLAVRKGEKYFIHWRGRWCLEACTRYTYRQRPGSRLSIGRHEAGGIVFSVDGMAGSRITLAPEGETERGVTLYLQD

SEQ ID NO: 1607 - protein, 392 aa, Neisseria
MTGRTGGNGSTQAQPERVMLVGVMLDKDGTGSSAARLNGFQTALAEAVELVKAAGGDSVRVETAKRDRPHTALFVGTGKAAELSEAVAADGIDLVVFNHELTPTQERNLEKELKCRVLDRVGLILAIFARRARTQEGRLQVELAQLSHLAGRLIRGYGHLQSQRGGIGMKGPGETKLETDRRLIAHRINALKKQLANLKKQRALRRKSRESGTIKTFALVGYTNVGKSSLFNRLTKSGIYAKDQLFATLDTTARRLYISPECSIILTDTVGFVSDLPHKLISAFSATLEETAQADVLLHVVDAAAPNSGQQIEDVENVLQEIHAGDIPCIKVYNKTDLLPSEEQNTGIWRDAAGKIAAVRISVAENTGIDALREAIAESCAAAPNTDETEMP

SEQ ID NO: 1608 - protein, 823 aa, Neisseria
MKKTCFHCGLDVPEHLHLTVRYENEDRETCCAGCQAVAQSIIDAGLGSYYKQRTADAQKTELPPQEILDQIRLYDLPEVQSDFVETHGGTREAVLMLGGITCAACVWLIEQQLLRTDGIVRIDLNYSTHRCRVVWDDGKIRLSDILLKIRQIGYTAAPYDAQKIEAANQKERKQYIVRLAVAGLGMMQTMMFALPTYLYGGDIEPDFLQILHWGGFLMVLPVVFYCAVPFYQGALRDLKNRRVGMDTPITVAIIMTFIAGVYSLATNAGQGMYFESIAMLLFFLLGGRFMEHIARRKAGDAAERLVKLIPAFCHHMPDYPDTQETCEAAVVKLKAGDIVLVKPGETIPVDGTVLEGSSAVNESMLTGESLPVAKMPSEKVTAGTLNTQSPLIIRTDRTGGGTRLSHIVRLLDRALAQKPRTAELAEQYASSFIFGELLLAVPVFIGWTLYADAHTALWITVALLVITCPCALSLATPTALAASTGTLAREGILIGGKQAIETLAQTTDIIFDKTGTLTQGKPAVRRISLLRGTDEAFVLAVAQALEQQSEHPLARAILNCRISDGSVPDIAIKQRLNRIGEGVGAQLTVNGETQVWALGRASYVAEISGKEPQTEGGGSAVYLGSQSGFQAVFYLTDPLKDSAAEAVRQLAGKNLTLHILSGDRETAVAETARALGVAHYRAQAMPEDKLEYVKALQKEGKKVLMIGDGINDAPVLAQADVSAAAAGGTDIARDGADIVLLNEDLRTVAHLLDQARRTRHIIRQNLIWAGAYNIIAVPLAVLGYVQPWIAALGMSFSSLAVLGNALRLHKRGKMQSEKMPSEQ

SEQ ID NO: 1609 - protein, 68 aa, Neisseria
MRKKIKKWIYAINGIMMSIWIIFFPNTGSVYDGGRTTIFNENHPFHFIFCITFLIGTIFLIYHEYNDN

SEQ ID NO: 1610 - protein, 258 aa, Neisseria
MAAFNTQKVLSVHHWTDAYFTFTCTRDESLRFENGQFVMVGLMVDGKPLMRAYSVASANWEEHLEFFSIKVQDGPLTSRLQHLKVGDDVLISKKPTGTLVAGDLNPGKHLYLLSTGTGIAPFLSITKDPEIYEQFEKIILVHGVRYKKDLAYYDRFTKELPEHEYLGDLVKEKLIYYPIVSREEFEHHGRLTDLMVSGKLFEDIGLPKINPQDDRAMLCGSPAMLKDTCKVLDDFGLTVSPKTGVRGDYLIERAFVDQ

SEQ ID NO: 1611 - protein, 264 aa, Neisseria
MTLPMQETRFSILLDELAAKQEAAIAPHLLADGTKVWIRKAGRHNARWRYALLGMVARYLKLGVLKPVPSLGGEPAIATESKRLYELRSAGIAVPELLAVRKNALMFGNLEGIPLDAQIRQEAEAGKSDAWLAGLEAIARVHKKRQFLSQAFARNMMSDGKNISFLDFEDDPSEVLTIAQCQARDWLCYIHSTALILKNGGLLEAAAEKWGGVLSDQPAEIQKLIAATVKPILPIRRLEHPRWGRDALRLAASISLISLADMPP

SEQ ID NO: 1612 - protein, 469 aa, Neisseria
MKYISTRGETAHKPFSEVLLMGLAPDGGLMLPEHYPQIGRETLDKWRGLAYPELAFEIMRLFVTDIPEDDLRDILNRTYTEAAFGTKEITPVRTLSDGIKIQALSNGPTLAFKDMAMQFLGNAFEYVLNKEGKKLNILGATSGDTGSAAEYALRGKKGVNVFMLSPDGKMSAFQRAQMYSLQDENIHNIAVKGMFDDCQDIVKAVQNDAAFKEKYHIGTVNSINWGRIVAQVVYYFAGYFNATSSNDETVSFCVPSGNFGNVCAGHIAKQMGLPIRRLIVATNENDVLDEFFKTGAYRPRNSAHTYVTSSPSMDISKASNFERFVFDLMDRDPAEINTLWAEVAAGKGFDLRFALDKVGGKYGFTSGKSTHADRLATIKQVYEQDQELIDPHTADGVKVAREVREEGEMVVCLETALAAKFDATIREAVGDAAIPRPAALEGLENLPQRVQTVPNSADAVKGIIEQTLA

SEQ ID NO: 1613 - protein, 123 aa, Neisseria
MNKTLSILPVAILLGGCAAGGGNTFGSLDGGTGMGGSIVKMAVGSQCRAELDKRSEWRLTALAMSAEKQAEWENKICACVAQEAPERMTGNDVMQMLAPSTRNQALAALTAKTVSACFKHLYR

SEQ ID NO: 1614 - protein, 489 aa, Neisseria
MEKHNGTYRDLHRPASEFATRDEYLEHELQIMQPKRWRPNLPFRDYRFEWEDLIPAMAGTIGKVVMVGAVAAAFAAPLGLPDSFVLENVRYELLIAAAFILLVSGFFLPGANLPGTHGPLIPMIPIVVSAGGHPLAFGISIAVLGLLMALFRGGSIMAKLTSNGVCGGLLLYLGFIGTTGQVKKLFSWAGGFNMPYIAFTVIIVTIVMYALLEHWKKRWLAVPLGCLIAGVVAFALGAPFEFHTAPGLPPMSPAYWWGENSGWHLGLPTAESFLVVFPFAVLAVAMWSPDFLGHQVFQKISYPEKTDKVLMNIDDTMTSCSVRQAVGSILGGANFTSSWGTYIVPASIAKRPIPGGAVLTAVLCIIAGLWGYPMDLAIWQPVLSVALVVGVYLPLLEAGMEMTRKGKTTQSAAIVVFSSALVNPVFGWALTMLLDNLGLIGCKERSAQLGFAGRVLIPAVGFLILCVAMGAVGMLPGIPPFLEHFKSLG

SEQ ID NO: 1615 - protein, 304 aa, Neisseria
MDAVQLKSFVAVAHEGNLTQAAKRLFLSQPAVSAQIKALEEYVGTPLFRRTGKGMVLTRAGEILLPEAESLLQYKHKLEHFAKTLAGDYSEETSLGIIHPIDSAKLVALTDNIGQTAPKTRLHIQYGMSGEILSRIQHKTLHGGFILGNAAQRGIRSVFLQNLTYALICPQSQYPHLTRSLPQSLQECVWIEMSGVSGSRKHLHQFWRSNRLSPKKQILCDYPQTIIDLVAGGIGVAMVPGNKAEAAAKEGAGVAIIESCRHSMPLNFIYAEEYEDNPHVSLLLECIEKVWGVQAVQPPVVSDN

SEQ ID NO: 1616 - protein, 321 aa, Neisseria; identical to SEQ ID NO: 816

SEQ ID NO: 1617 - protein, 636 aa, Neisseria
MNILSVENASFAIGHVALLDKTSFQLDSGEKVGLIGRNGAGKSSFLKILAGLQKLDDGQIIVQNNLKIVYVPQESFFDKDATVFDTVAEGLGEIRDLLRRYHHVSHELENGSSEALLKELNELQLEIEAKDGWKLDAAVKQTLGELGLPENEKIGNLSGGQKKRVALAQAWVQKPDVLLLDEPTNHLDIDAIIWLENLLKAFEGSLVVITHDRRFLDNIATRIVELDRGILRSYPGSFSKYSEKKAQELAVEAEHNRLFDKFHAQEEAWIRKGIEARRTRNEGRVRRLEELRRQRAERRNVQGQVNFKLDSGEKSGKIIAELEHASFAYGGKVIMDKFSAILQRGDKIGLIGPNGIGKTTFLKLILGELQPTYGRIRIGSKQEVAYFDQFRSALNENDTVFYTLGQGNDYVEVGGKKKHVMSYLEDFLFHPARAQSPVSSLSGGERNRLLLAKLFTRPANILVLDEPTNDLDIDTQELLEDLLRDYQGTVFLVSHDRMFLDNVITQSIVFEGQGRLKEYIGGYQDYIDAKSREDKIQTASAPKASDAEPAKEKPKANRTVKLSYKEQRELDALPDEIAALEAEQAEINTQLSYPEIFKDYEKAGALQNRAEEIEMLLLEKLERWELLETKRNGNAV

SEQ ID NO: 1618 - protein, 214 aa, Neisseria
MLASAIDFILHIDQHLLALSAQYGVWIYAILFLIVFCETGLIVTPLLPGDSLLFAAGGIAALGGMDIHLMVALLSLAAILGDALNFTVGKYFGGRLFANPDSKIFRREYLDKTHRFYEKHGGKTIIIARFMPIVRTFAPFVAGMGKMHYAKFIRYNIIGGLLWVILFSYAGYFFANFPVVKNNLGLVMGGIIIVSVLPGAVEIARAKLAVKSKR

SEQ ID NO: 1619 - protein, 272 aa, Neisseria
MKKTVFTCAMIALTGTAAAAQELQTANEFTVHTDLSSISSTRAFLKEKHKAAKHISVRADIPFDANQGIRLEAGFGRSKKNIINLETDENKLGKTKNVKLPTGVPENRIDLYTGYTYTQTLSDSLNFRVGAGLGFESSKDSIKTTKHTLHSSRQSWLAKVHADLLSQLGNGWYINPWSEVKFDLNSRYKLNTGVTNLKKDINQKTNGWGFGLGANIGKKLGESASIEAGPFYKQRTYKESGEFSVTTKSGDVSLTIPKTSIREYGLRVGIKF

SEQ ID NO: 1620 - protein, 311 aa, Neisseria
MFKAVLLGQWHSLSDPELEHSLITRIDFNLFCRFDELSIPDYSTLCRYRNWLAQDNTLSELLELINRQLTEKGLKVEKASAAVIDATIIQTAGSTQRQVIEVDEEGQINGQTTPSKDSDARWIKKNGLYKLGYKQHTRTDAEGYIEKLHITPANAHECKHLPPLLEGLPKGTTVYADKGYDSAENRQHLEEHQLLDGIMRKACRNRPLTETQTKRNRYLSKTRYSGLNLNQDKATKPQTVQIVRQGEATPYWFKFNPLYVVEQSFGTLHRKFRYARAAYFGLIKVSAQSHLKAMCLNLLKAANRLSAPAAA

SEQ ID NO: 1621 - protein, 416 aa, Neisseria
MFSKSVTLAQYDPDLAAAIAQEDQRQQDHVELIASENYVSCAVMDAQGSQLTNKYAEGYPGKRYYGGCEYVDIVEQLAIDRVKELFGAAYANVQPHSGSQANQAVYASVLKPGDTILGMSLAHGGHLTHGASVNISGKLYNAVTYGLDENEVLDYAEVERLALEHKPKMIVAGASAYALQIDWAKFREIADKVGAYLFVDMAHYAGLVAGGEYPNPVPFCDFVTTTTHKTLRGPRGGVILCRDNTHEKALNSSIFPSLQGGPLMHVIAAKAVAFKEALQPEFKQYAKQVKINAAAMAEELVKRGLRIVSGRTESHVFLVDLQPMKITGKAAEAALGKAHITVNKNAIPNDPEKPFVTSGIRIGSAAMTTRGFNEADARVLANLVADVLSNPEDEANLAKVRKQVTALCNKYPVYGA

SEQ ID NO: 1622 - protein, 70 aa, Neisseria
MVYQRVMADKDVVGAGYLIDFAQTAENLPFNVLLLISLVLNKGNETLKTSMLNKLPDNAKENLRIMGYLP

SEQ ID NO: 1623 - protein, 606 aa, Neisseria
MPCMNHQSNSGEGVLVAKTYLLTALIMSMTISGCQVIHANQGKVNTHSAVITGADAHTPEHATGLTEQKQVIASDFMVASANPLATQAGYDILKQGGSAADAMVAVQTTLSLVEPQSSGLGGGAFVLYWDNTAKTLTTFDGRETAPMRATPELFLDKDGQPLKFMEAVVGGRSVGTPAIPKLMETIHQRYGVLPWGKLFDTPIRLAKQGFEVSPRLAISVEQNQQHLARYPKTAAYFLPNGVPLQAGSLLKNLEFADSVQALAAQGAKALHTGKYAQNIVSVVQNAKDNPGQLSLQDLSDYQVVERPPVCVTYRIYEVCGMGAPSSGGIAVGQILGILNEFSPNQVGYDAEGLRLLGDASRLAFADRDVYLGDPDFVPVPIRQLISKDYLKHRSQLLEQSDKALPSVSAGDFIHEWVSSQAIELPSTSHISIVDKAGNVLSMTTSIENAFGSTLMANGYLLNNELTDFSFEPIKQGKQVANRVEPGKRPRSSMAPTIVFKAGKPYMAIGSPGGSRIIGYVAKTIVAHSDWNMDIQNAISAPNLLNRFGSYELETGTTAVQWQQALNDLGYKTDVRELNSGVQAIIIEPSRLVGGADPRREGRVMGD

SEQ ID NO: 1624 - protein, 72 aa, Neisseria
MFPEYRDLISKLKQENSRFARLFDEHNELDDKITGLVNNPVTSGAETIDELKKAKLKLKDELYAILQKAAGK

SEQ ID NO: 1625 - protein, 324 aa, Neisseria
MDTLTRFLPEHLQQNQLPEALGGVLLSVVSACTEINAKVRLGALAGVLGMAGTGNIQGEDQKKLDVIANNIMIDTLKANSAVAGLASEEEDTFVNAGENGRYLVLFDPLDGSSNIDVNISVGTIFSILEKPEGALATESFLQTGRQQLAAGYVLYGPQTQLVFTFGHGVYMFTLNAENEFVLTKENPKVPESTKEFAINMSNRRHWLPPVQQYIDELLAGETGTRGKNYNMRWVASMVAEIHRILMRGGVFMYPQDKRDPAKPGKLRLMYEANPMSLILEQAGASASNAYQAMLDIQPENLHQRVAVFMGSSEEVAYLDRLHAK

SEQ ID NO: 1626 - protein, 281 aa, Neisseria
MLSYRHAFHAGNHADMLKHFTLFLVLQYFNRKDKPYWYIDTHGGAGVYNLEGSEAQKVGEYRQGIALLRQAQNLPAELSDFAAHIQKILPSPKLYCGSPWLAQSLTRVGDKLRLFELHPTDFVHLQNNMGEAGLGKRGQVLREDGYKGLISLLPPPPRRATVLIDPPYEEKQDYRRVTETLKAALKRFESGCYLIWYPCLSREESRKLPEELKKLLPDNYLHAELHVHAPKADGFGMHGSGMFVINPPYLLAEQLAANLPALTRLLAQDEGSRYLLDSKIR

SEQ ID NO: 1627 - protein, 200 aa, Neisseria
MFNIPAVAVSYLIGSLSFAVIVSKYYGMDDPRTYGSGNPGATNVLRSGKKKAAALTLLGDAAKGLVAVLLARVLQEPLGLSDSAIAAVALAALVGHMWPVFFGFKGGKGVATALGVLLALSPATALVCALIWLVMAFGFKVSSLAALTATIAAPVAASFFMPHVSWVWATVAIALLVLFRHKSNIVKLLEGRESKIGGSR

SEQ ID NO: 1628 - protein, 118 aa, Neisseria
MDKIFLHGMKADTLIGVYGWERERLQTLIVDLDIGVPEKAGSDDDIANTVHYAEVCETLRRHLKEQDFLLLEALAEYIADLVLGYFGAVWVRVKIVKPGILEGVREVGVEIERGKRED

SEQ ID NO: 1629 - protein, 178 aa, Neisseria
MDLREVKLGGETIYEGGFVSISRDKVRLPNGNEGQRIVIRHPGAACVLAVTDEGKVVLVRQWRYAANQATLELPAGKLDVAGEDMAACALRELAEETPYTADSVRLLYSFYTAVGFCNEKMYLFEAEGVRLGSTLANDEDEITETVLMSKEEVRQALANDEIKDGKTLIGLQYWLMKD

SEQ ID NO: 1630 - protein, 119 aa, Neisseria
MLSNIIPLSIGAALGATARWLLNLAVPASIPPATGNLFANWIGAFLIGIFAETVNHPQWKLLLITGFLGSLTTLSGFSLETVTLLQLNRPASALANIFLHTAGSLLLTWLGLKIGAAVK

SEQ ID NO: 1631 - protein, 226 aa, Neisseria
MIFQTVWFSDMVLSVSWIVLILILAASAPSAFRSLARYRSALPLCTVIFSAAWCLNASAGGGQLAQMNYHLLAVNLVALMMGTSAALWLAALLMLPYCLLFAGSVGAYPPNALVLILPALTVNRLSRMLVNRLPPNIFIFIFVNGFLASAAGILLTGLVLTGILDAANAFPSEILWTTALPVFILLAWAEAFLSGISTAIFVALKPHWINTFDDNRYLKSDRGIWR

SEQ ID NO: 1632 - protein, 1014 aa, Neisseria; identical to SEQ ID NO: 245

SEQ ID NO: 1633 - protein, 420 aa, Neisseria
MSNTQKQLALAKAAKKSVNTADTEEKNRALLAMADSLEAATADILAANRQDLEAAAGNIPESMTDRLLLDGKRICAMADGIRAVAALPNPVGEILETSTLPNGLEIVKKRVAMGVIGIIYESRPNVTSDAAALALKSGSAVVLRSGKDAFQSARAIVAALKTGLAQTRIDPDALQLIEDTGRESSYEMMRAKDYLDLLIPRGGAGLIRAVVENAVVPVIETGTGIVHIYIDKDADWDKALRIVYNAKTSRPSVCNSMEVLLVHEDIAADFLPKLERLLVRDRIEAGLPPIRFRLDPQAARHIGGEAAGADDFDTEFLDYILAVKTVASVEEAVWHIETHSTHHSDGIVTENRHAADYFTTHIDSAAVYVNASTRFTDGGEFGLGCEMGISTQKLHARGPMGLKELTSYKYIVQGTGQVRE

SEQ ID NO: 1634 - protein, 369 aa, Neisseria
MKYKRIVFKVGTSSITHSDGSLSRGKIQTITCQLAALHHAGHELVLVSSGAVAAGFGALGFKKRPVKIADKQASAAVGQGLLMEEYTANLSSDGIVSAQILLSRADFADKRRYQNAGGALSVLLQRRAVPIINENDTVSVEELKIGDNDTLSAQVAAMIQADLLVLLTDIDGLYTGNPNSNPDAVRLDKIEHINHEIIEMAGGSGSANGTGGMLTKIKAATIAAESGVPVYICSSLKPDALAEAAEHQADGSFFVPRAKGLRTQKQWLAFYSESRGSVYVDEGAEHALSEQGKSLLMSGIAGIEGHFSRMDTVTVYSKATKQPLGKGRVLFGSAAAEDLLKSRKAKGVFIHRDDWISITPEIRLLLTEF

SEQ ID NO: 1635 - protein, 517 aa, Neisseria
MTQTNRVIIFDTTLRDGEQSPGAAMTKEEKIRVARQLEKLGVDIIEAGFAAASPGDFEAVNAIAKTITKSTVCSLSRAIERDIRQAGEAVAPAPKKRIHTFIATSPIHMEYKLKMKPKQVIEAAVKAVKIAREYTDDVEFSCEDALRSEIDFLAEICGAVIEAGATTINIPDTVGYSIPYKTEEFFRELIAKTPNGGKVVWSAHCHNDLGLAVANSLAALKGGARQVECTVNGLGERAGNASVEEIVMALKVRHDLFGLETGIDTTQIVPSSKLVSTITGYPVQPNKAIVGANAFSHESGIHQDGVLKHRETYEIMSAESVGWATNRLSLGKLSGRNAFKTKLADLGIELESEEALNAAFARFKELADKKREIFDEDLHALVSDEMGSMNAESYKFISQKISTETGEEPRADIVFSIKGEEKRASATGSGPVDAIFKAIESVAQSGAALQIYSVNAVTQGTESQGETSVRLARGNRVVNGQGADTDVLVATAKAYLSALSKLEFSAAKPKAQGSGTI

SEQ ID NO: 1636 - protein, 220 aa, Neisseria
MDSRKFTEASKRRLSELLDAKSEQGNTMRCDEVQGFMTALLSGPDKLTPLDWLPEVLGDESQFTAAERSEIERLVLAMAMETTAAMSDKKLPDLWLYENEDGGSDFYTWCNAYLYGLDIVPTDWFEAVDDEAFEELFYPIMALGGIYDEEENGAIRLQFTEGELAELESELPYALADIYRYWQAVINKPQTVRREGEKTGRNDPCPCGSGRKYKACCGKN

SEQ ID NO: 1637 - protein, 283 aa, Neisseria
MITHPQFDPVLISIGPLAVRWYALSYILGFILFTFLGRRRIAQGLSVFTKESLDDFLTWGILGVILGGRLGYVLFYKFSDYLAHPLDIFKVWEGGMSFHGGFLGVVIAIRLFGRKHGIGFLKLMDTVAPLVPLGLASGRIGNFINGELWGRVTDINAFWAMGFPQARYEDAEAAAHNPLWAEWLQQYGMLPRHPSQLYQFALEGICLFTVIWLFSKKQRSTGQVASLFLGGYGIFRFIAEFARQPDDYLGLLTLGLSMGQWLSVPMIVLGIVGFVRFGMKKQH

SEQ ID NO: 1638 - protein, 376 aa, Neisseria
MIKISTRFDAGSVVVKDLTDPSNIRLALRPDNASDFAQWFYFRLQGAAYQNCIMHFENAAEAAYPKGWEGYQACASYDRRNWFRVPTSYENGVLTVNHTPLSNSVYYAYFEPYSEEQHLNLLGDAQGSGLCRIDDLGSTVQGRDINLLTIGNQVESDLKIWITARQHPGETMAEWFIEGLLGRLLDPQDPTARALLDRATFYIVPNMNPDGSALGNLRTNAAGANLNREWENPTVEKSPEVFFVREKMLETGVDLFLDIHGDEGLPFVFVAGTEGVPNYNPRIAALEAQFKNALLNASPDFQDEYGYEKDAPGEANMTLATNWVGNRFNCLAYTLEMPFKDNANLPDDDFGWNGQRSLRLGEAALSAILNVIGDLR

SEQ ID NO: 1639 - protein, 298 aa, Neisseria
MESENIISAADKARILAEALPYIRRFSGSVAVIKYGGNAMTEPALKEGFARDVVLLKLVGIHPVIVHGGGPQINAMLEKVGKKGEFVQGMRVTDKEAMDIVEMVLGGHVNKEIVSMINTYGGHAVGVSGRDDHFIKAKKLLIDTPEQNGVDIGQVGTVESIDTGLVKGLIERGCIPVVAPVGVGEKGEAFNINADLVAGKLAEELNAEKLLMMTNIAGVMDKTGNLLTKLTPKRIDELIADGTLYGGMLPKIASAVEAAVNGVKATHIIDGRLPNALLLEIFTDAGIGSMILGGGEDA

SEQ ID NO: 1640 - protein, 180 aa, Neisseria
MKNLAIFDLDNTLINTDSDHAWPQYLIKKGLVDAAETEAQNEKFYRDYQNGCLDIDAFLKFHLAPLARYSKEELAEFHREFMAEYIIPHISPMQRMLVQSHQMAGDETLVISSTNEFIITPVCHLFGITNIIGTQLETGSDGRYTGNYIGTPSLKEGKITRLNQWLAERGETLQSYGKTY

SEQ ID NO: 1641 - protein, 222 aa, Neisseria
MNQLIFDFAAHDYPSFDKFLGTENAELVYVLRHKHGQFIYVWGEEGAGKSHLLQAWVAQALEAGKNAAYIDAASMPLTDAAFEAEYLAVDQVEKLGNEEQALLFSIFNRFRNSGKGFLLLGSEYTPQQLVIREDLRTRMAYCLVYEVKPLTDQEKIDALASMAAARQVTVDSEIFEYLLKHWRRDMDSLMMMLDTLDNYAVTMGKRITLPLLRQLLKQQETQ

SEQ ID NO: 1642 - protein, 183 aa, Neisseria
MSGININLKNGDSLLIRGPSGCGKTSLLRALAGLWPFGSSGKVSRPPHQDILFLPQRPYTAQGSLRDAVCYPDIDKQHPELAEAMNTCRLGYLVDKLDKTDDWQHKLSPGELQRVAFVRALLSKPKIVLLDEATAALDEPTEALLYRALKQKLPDSIIISIGHRSTLNAFHNMRLDVGNVACG

SEQ ID NO: 1643 - protein, 661 aa, Neisseria
MKISASDIAKLGIPSLPTDRQGIEYHAKKNNWQHCFEQKGRGRPKKLYEIASLPAEIRAAIMKRQSDELAEKMPKMLPKVRPGTAMSAQALAEAAKLLNEKQRSVADARCAVVAAVLGIKYEYDCSAKAAVAQFLGLLAEGKLDAVTLGNLEKANDRSRTAKVGERTLDGWISAYLKAENATERLVALAPKTTKAVKPIESYGWLPMFMQFHNIPSAPKLAHSYRWFVQWAEAENMPVNDVPNLSMVRRVWEKLPLIMQERGRKTGAAYKSLLPYVKRDWGALKPNDVWIGDGHSFKAKVAHPVHGRPFKPEVTVIIDGCTRFVVGFSVSLAESCVAVSDAMRIGVKHFGLPIIYYSDNGGGQTGKTIDHEITGITSRPGIRHETGIAGNPQGRGIIERWWKDNLIEMARQYETFAGAGMDSSTKNLMYRKMESAFNALEKGKDLTEEQQKYLKKLPSWSRFIADVVKCIDEYNNRPHGELPRHPDGGHYTPKAYREMRLEQDGIAPDMLSAQELATMFMPQEVRKVQRGWLDLFNNSYFSTELAEYHKDEVRVSYDLSDASAVNVFDMDGKFITKAQANGNTREAFPTARIDQLAEKRRKGKIKRAENAIKLANAEVNPALEQAAVWDELGHLGGNDIEAEYAVLPKTGTDDFVLFEADR

SEQ ID NO: 1644 - protein, 66 aa, Neisseria
MMDKQQNAAFSAELVEKLKLKRALGRIQRAQAKIQGVPAERNQAQTFLPALEGNCEPAQSKSALDG

SEQ ID NO: 1645 - protein, 390 aa, Neisseria
MKQINQALQQKLVEFKEKSGMNQTQLARGIGTSPASISMYLNGTYAEKGGNYETIEPKIEAFLEMQDSKAQREELVLGFVSTKTTRRIAEVMRDAHEGGETVVIYGQAGLGKTQAVKNYCEKNPAAILIEANPSFTALVLMRKLATAAKVSAMGSLNDLFESVSDRLRDSGRLIVVDEAENLPLRALEIVRRLHDETGCGLVLSGMPRLVANLRGKHGELVQLYSRVSVALNLGESLPDDELFEIAKAALPDAVKHLLPDSVQALITVIGFNETLELVRLMGGTTYPLRQGYTKNSQSRVAYLEEIIGSEAAGRLVEAMAPCNLFIPRCETALYELRNRKIRSQFDRQTAGGTPAYEAVNDLALAHRLSDRHVWRILKQADKEAEQENLF

SEQ ID NO: 1646 - protein, 173 aa, Neisseria
MECHADVWHFILEKNMKKFYFVLLALGLAACGQEQSQKADAEQYFFANKYQFADEKQAFYFERAARFRVLQQGLGGDFERFLKGEIPNQENLAKYRENITQAVAYYADTNGDDDPYRVCKQAAQDAEILMKSMVTSGGGGTTDLDKESYQNYRKSMQECRKTITEAEANLPKK

SEQ ID NO: 1647 - protein, 181 aa, Neisseria
MSKIICLTAGHSNTDPGAVNGSDREADLAQDMRNIVASILRNDYGLTVKTDGTGKGNMPLRDAVKLIRGSDVAIEFHTNAAANKTATGIEALSTPKNKRWCQVLGKAVAKKTGWKLRGEDGFKPDNAGQHSRLAYAQAGGIVFEPFFISNDTDLALFKTTKWGICRAIADAIAMELGAAKV

SEQ ID NO: 1648 - protein, 78 aa, Neisseria
MRILDIFKNPATGNVSHSKLWANVACAAGTFKFVMLPDPSAEIWAVYLGIVGGYAVARSFVSVKRQEVENESRETAGE

SEQ ID NO: 1649 - protein, 101 aa, Neisseria
MSLLKTVKMQAAVALTALALTACSSTTAPSATEIKVVEKAVMPTPPAALMVAPVRPNPPKDGKTATLLEHAAEFGGYVAELENQNQAWRDWAGNHSRKVGN

SEQ ID NO: 1650 - protein, 56 aa, Neisseria
MYFEIYKDAKGEYRWRLKAANHEIIAQGEGYTSKQNCQHAVDLLKSTTAATPVKEV

SEQ ID NO: 1651 - protein, 112 aa, Neisseria
MTYRELVERQLAVRHADLELGLSRAREQEPFVIHVSDLLDKAGIEYAVRMDKDFQTTFHLEYPITNYDTFKRAVWQTLGAYYCVCNDGDGLEIASNRPDGYAVRIVFGDVPV

SEQ ID NO: 1652 - protein, 88 aa, Neisseria
MDFEFGFRTLWPIATAAFWFWVNGISGRLKEADKRIDDLKEELHAVKLSYHTKADAKADSTNIAAALERIENKLEKVNEKLDRKADKS

SEQ ID NO: 1653 - protein, 65 aa, Neisseria
MSDPILDALARIENKTDQTLKNQKEMQAEIAQIRQDTKRTAITFGALGGGVITVGWELLKAKMGL

SEQ ID NO: 1654 - protein, 168 aa, Neisseria
MAHPQEIREKLRRLYVSGEQTLETAALMCEIPQTTARAWKRADKEKGDDWDKMRAAYTLAGGGIEDLSRAMLAGFMVQYNSTMTMLQDSSTEDLPPSDRAKLLASLADAFTKTVSANARVMPETSKLATALELIEFLMAFVQEKHPKHLPAFVEVLEPFGVEVEKKFG

SEQ ID NO: 1655 - protein, 196 aa, Neisseria
MNWLNRGIQEKILRVLSDNYPNCLKATKVYNSLFPSSSLPITSNIPVDKQGLGLALTLGCEIQSQHLATLQSDEFQYFLKNIYYLEESGLIEITSIDSLHKNFDCKINHKGIDFLTDDGGLSAILGVVTVKLHSDTIQALIAAKIDQAEISDSEKSWLKKELGKIKDTALSTLTENAINAIPAATLITLLKKFVGL

SEQ ID NO: 1656 - protein, 516 aa, Neisseria
MDGFDASPKAIAARRAKVFDPVGGYEYFVNTYFPHYIRSPEKSELHAFLFSRLPEIIRSPKGENEAVGAPRGEGKSTKVTQLFTLWCIVTGQKHYAVIVMDSIDQAYPMLEAIKAELEFNPRLKTDFPEVCGQGRVWQAGTIVTANDVKVQVAGSGKKLRGLRHGPYRPDLTVLDDIENDEQVRNPEQRDKLNAWLTKTVLPLGGVGQKYDVIYIGTILHYDSVLNRTLNNPFWHGIKFKAMKRWPDRMDLWDRWEELFRNDGETVAEAFYQANKDEMERGAVTSWAARGVLALMKIRARDGHATFDSEYQNDPVSGEDAPFAKSMKFWNDLPSDLVYFGALDPSLGKAGASRDPSAIIIGGYQRVTGKLYVVEAQIKKRLPDLIIEDVIRLHRQYRCKLWFVETVQFQEFLKDELVKRSAARGIPVPARAVKPVSDKLLRIETLQPHMANGLILLNESQQTLIQQFRHFPKADHDDGPDAVHMLWSGAVANCVPIEWQSPTDNDFDDEIKSKWSR

SEQ ID NO: 1657 - protein, 522 aa, Neisseria
MAKKNNKTKIQKPEAALQTDVAQITATGRVIAEHPSNFITPQKMRALFEDAESGDIRAQHELFADIEERDSDIAANMGTRKRALLTLNWRVAPPRNATPEEEKLSDQAYEMMDSLPTLEDLIMDLMDAVGHGFSALEVEWVFSDGLYLPRNFIHRPQSWFKWDKDNGLLLRTRENPEGEALWPLGWVVHTQKSRSVQQARNGLFRTLSWLYMFKHYAVHDFAEFLELYGMPIRIGKYGAGATKEEKNTLLRAVAEIGHNAAGIMPEGMEIELHNAANGTTATSNPFLQMADWCEKSAARLILGQTLTSGADGKSSTNALGNIHNEVRRDLLVSDAKQVAQTITSQIIGPFLQINYPHADPNRVPKFEFDTREPKDIAVFADAIPKLVDVGVQIPESWVRDKLVIPDVQEGEAVLVRQVPDNPVNRTALAALSAHTVPSKATGRHQEILDGALDDALVEPDFNSQLNPMVRQAVAALNACNSYEEADAALNALYPNLDNAKLRTYMQQALFISDILGQDHARA

SEQ ID NO: 1658 - protein, 431 aa, Neisseria
MPAPDLGFALSLPPKKAIEWLESKKVTAESYRNLTASEIAKVYTIARMTDLDMLNDIKTSMVESAKSGQSFDDWRKGILNLLSNKGWLHPNGHNGKDIIDPATGEVFGSPRRLETIYRTNMQTAYNAGQYQGYMANIDARPYWMYDAVGDSRTRPAHSAIDGLVYRYDDPFWATFYPPNGYNCRCSVIALSERDVERQGRIVGQSTADNLVETHKIYNKKGDTYLTLAYKAPDGSLYTTDRGFDYNAGRMNYRPDLDKYDRALAHQFAKAEMGGADFKTSFKQLEKEFYEVKQRLDIDGKPDKEQKIKIRNALSRQLKFAAGVLSKETQELAGMTRATVWLSDDTLVKQVDSREGQNFDDSYYAFLPDMLQNPEHVIRDNRELIFTARYKGSALWAVLKYIKEVDEIYLQSYRISNDKEIAKFMAKKKVLK

SEQ ID NO: 1659 - protein, 353 aa, Neisseria
MSKNAQKTLLAVCSFEVQPKDGRIQLLPYGEFRAVDGRPTDVPAWYLTEENGHDVALLANSSRNQLVVDYEHQTLYKEKNGQPAPAAGWMRWLEFTPKGMFAEVEWTDKAAAAIAAKEYRYISAVFSYDTKGYVSKIFHAALTNFPALDGMDEVLAAASAQILKPETEQNPMKELLQQLFDLPDAGEEELKAALSALVEAKPKDVALSADVFAQLAEKDSRIAALTAQTAKPDLTKYAPISVVQELQSKVAALTAKQEADKGNELITAALTSGKLLPAQKEWAKGVLKQPGGLAFLTGFIENAQPVAALAGSQTGGKAPDERVAALTAEEAAAAKMLGMSGEEFVKIKESEGK

SEQ ID NO: 1660 - protein, 321 aa, Neisseria
MSYTQLTQGERYHIQYLSRHCTVTEIAKQLNRHKSTISREIRRHRTQGQQYSAEKAQRQSRTIKQRKRQPYKLDSQLIQHIDPLIRRKLSPEQVCAYLCKHHQITLHHSTIYRYLRQDKSNGSTLWQHLRICSKPYRKRYGSTWTRGKVPNRVGIENRPAIVDQKSRIGDWEADTIVGKGQKSALLTLVERVTRYTIICKLDSLKAEDTARAAVRALKAHKDRVHTITMDNGKEFYQHTKITKALKAETYFCRPYHSWEKGLNENTNGLIRQYFPKQTDFRNISDREIRRVQDELNHRPRKTLGYETPSVLFLNLFQPLVP

SEQ ID NO: 1661 - protein, 160 aa, Neisseria
MLPHTGLFLLGKVALQMRIRRRLKQGVIMAKTNNKPETAETAAPSFEDIKAELDAVQAELAAARNDVEMLTTALEKAEDDKKALSAELAELKVQHTQRAADALADSRDVMLVSTGADGKEFWRGGLLFDGGWREVKRAEVGEAVWKAICAEPMLQRKAVE

SEQ ID NO: 1662 - protein, 140 aa, Neisseria
MAYATVEDMVARFGELEVLQLTDRNNEGLIDREVAQTALVDATAEIDAYLGRFRRPFEDLPPILVRLCCDIARYRLTAAQGVLITDEIRNRYKIDVLDLLRAMAKGEVQLGVDDSGEEVAAGEDGIVFVNGKNKVFGRDH

SEQ ID NO: 1663 - protein, 197 aa, Neisseria
MVRTVKSYNGEADDLAGQIHTLPAVWVTYGGSKVEPASTGGVCGRYQDTAEFVVMVAARNLRNEQAQRQGGIDSREIGSNDLIRAVRRLLDGQRLGFADSRGLVPKAVRAIANHVLVQNAAVSIYAVEYAIRFNTCGLENDRYPERTDNPDDPNHIFTKYQGTLSEPWPDFEGLDGKIYDPQSADEIPVNLTLKDKQ

SEQ ID NO: 1664 - protein, 65 aa, Neisseria
MSKIKVTAADGLRVPTEHNPHEYIGQEPVEVDGNSLYYRRMIDDGDLVVVEDAAPNTKTRNTKGE

SEQ ID NO: 1665 - protein, 469 aa, Neisseria
MPHIDFDTIPGSIRVPGQYIEFNTRNAVQGLPQNPQKVLMVAPMLTAGIQPALEPVQLFSDAEAADLFGQGSLAHLMVRQAFANNPYLDLTVIGIADHSAGVQATATVTLSGTATAPGVVEITIGGKQVSTAVNTGETAATVADRLKTAITAADVTVTASGSGAAVTLTAKHKGEIGNESGLTVSTGNTGLTYQANAFTGGAKNADIATALSKVAGKHYHIICSPFSDDANAKALSNHITNVSNAIEQRGCIGVLGMSAALSTATTATGEINDGRMTCAWYKGAVEPNGIIAAGYAAVLAFEEDPAKPLNTLEIKGLAVTPDAQWPLFAECNNALYNGLTPLTVVNNRVQIMRAVSTYTKSANNTDDPALLDITTIRTLDYVRRSVKERIALRFPRDKLSDRLLPKVKSEILDVLIKLDQAEIIENAEANKGKLVVARAQNDPNRVNAIIPADVVNGLHVFAGRIDLIL

SEQ ID NO: 1666 - protein, 125 aa, Neisseria
MSDATYADAVIMEMNGRDIEIVSIKPQTTTGRKPVKTMNRNGRVNGYCDGVTEHKLSVTAAIPIDGTEIDWDNITKAKITIYPINDEDRRTSYLDCFTVDTGEQYEVDNEARIDIEMIALHKIKE

SEQ ID NO: 1667 - protein, 121 aa, Neisseria
MITVKLTHGLTYNGKVVSELRLKPLTVGGELAAFALIDDLPELPENATKAELLQRDVLETLTYWSQQIEAQGIPSDILTAQWLMENLSTEDYHTVMAAQEDLRLKPSAATASPDAPSAAEQ

SEQ ID NO: 1668 - protein, 200 aa, Neisseria
MNMKKLISAICVSIVLSACNQQSKTAQAEEPVQSIQAADCTAPMDITVEQYLINLEQAFKTQNVSTKIHNKNIVKTDCGYDLTLVMDFGAIALKLDEQQKIRAISVGYILKTDGEKGQNLVNNAINGLHSIQAVLSLTTTDKLGESEAGKQLFTALTEVVKESNQTGATAQKDVPADGILYSVVFEKETNTIAIIGRKQP

SEQ ID NO: 1669 - protein, 718 aa, Neisseria
MKLSLVLTARDDGARRLLADTQRQLDRTAKSRAQLERQSHTYALTGIRSEKQIQREIMLTQAAFNRLARSGKASQNDLARAAVATRNRIRELNAELKQGTGFADKMGKIGRFGAAAVAGGAAAYTVLKPAMDNRKQLDENINRVSRQAFIEDNSKSAAWIATEGAQQIKDLALELVEKNGGTHDKALDLISGMMTTGLNFAQTKNEAQAAYAFALASEGSGEDTAKLIKTLKDGGMSGKDLQLGLEHVLQSGLDGTFEVRDMVRELPSLLSAAQQAGMNGVGGLDYLLSLLQSAANKSGSPAEAATNVQNLLSKTLSPDTIGRLKKMANPNDPKKGVDWIGSVVQGKQNGENAVQVLSRLADAMLVKDKQYQDYKKRAAAGDKTAAEQANMLKGALLAQLLPDLQAKQGLLAATDMTQIREYMASLAGVTLDNGKIAKNNEARMLSAAAQQEQQESLAMLRESLTGTLVDMETSFKKLAAEYPNATLALQALTTAATAASAAMLLTAGGGKGAGFLKDVGSKALGWGKASAGGVAAGATAAGGKLLSWGKSAGSGLMNNPALVKRAGLLGMLLYSESLGDGTLPKGLRGTKTTPEMINRLKNNGIRFEPAPKREQARGGVPQYLAAPSAQPTDKMLSPLFSTQTAAYQAAIQQQTAAYQAALAQDTAAVTTGLAQVQSAMASASQTINTNVSLNIDGRVIANEVSRYQVAMFGRGAGQ

SEQ ID NO: 1670 - protein, 443 aa, Neisseria
MSGWHTLLQDASYKGVGFDIEVVDESNGKALAEHARPFVQGIDLEDMGMTGRQVQINAVFWGKGYAGRLKKLLDALEQPGGGVLVHPVWGRMHNMIAASWSYRHEADYVDYAGIDITFREAAEAQEIFVFENAFLVELEALIANIDTYREAAIGFVDAVLAVDAGVSALWGSALGIWSAASGTFGAVRRLFDLDKIAFPDRGGYSAAAFKNGSAKLFADISVMVDTGIRREAGLADNAMHHAGWSPRQRFDGAAAVADRAAAIPDNLLTGRFSDGLQNRLNRLTAKQVQPVAQAVRLLSTSSLLSVATALIEAHGEEMTAPDLIEVNRAMRRRMQAEIAALRAVQTAAAESGGLTANAVYTEAYQTAESLRAAAGRLNALVAAVINQKPPLIVRQAPIDGTIHQIAHEFYGDIARAAELVRLNPHIHHPAFIKRGTLVNSYAK

SEQ ID NO: 1671 - protein, 381 aa, Neisseria
MQNNSYGYAVSVRVGGKEHRHWERYDIDSDFLIPADSFDFVIGRLGPEAAIPDLSGESCEVVIDGQIVMTGIIGSQRHGKSKGSRELSLSGRDLAGFLVDCSAPQLNVKGMTVLDAAKKLAAPWPQIKAVVLKAENNPALGKIDIEPGETVWQALTHIANSVGLHPWLEPDGTLVVGGADYSSPPVATLCWSRTDSRCNIERMDIEWDTDNRFSEVTFLAQSHGRSGDSAKHDLKWVYKDPTMTLHRPKTVVVSDADNLAALQKQAKKQLADWRLEGFTLTITVGGHKTRDGVLWQPGLRVHVIDDEHGIDAVFFLMGRRFMLSRMDGTQTELRLKEDGIWTPDAYPKKAEAARKRKGKRKGVSHKGKKGGKKQAETAVFE

SEQ ID NO: 1672 - protein, 222 aa, Neisseria
MSLSKLAKKTAQTAKNIGETLRAAFRGKITLVVSSEPIQRVQLSGLADETLQDLEHLQEYGFASHPPDGSEAVVIPLGGNTSHGVIVCSQHGSYRIKNLKPGETAIFNHEGAKIVIKQGKIIEADCDVYRVNCKQYEVNAATDAKFNAPLVETSAVLTAQGQINGNGGMAVEGGDGATFSGDVNQTGGSFNTDGDVVAGNISLRQHPHTDSIGGKTLPAEPA

SEQ ID NO: 1673 - protein, 115 aa, Neisseria
MDKELNPSIGDYTGRTVDTLQNAVYIRLMTPLGSWWADKTLGSLLHLLQREKDLQRVSLLAEQYADEALQPIVKSGRADKITVRAEQPHDGRLILHIRMDTAAGGFDYRHEVPVI

SEQ ID NO: 1674 - protein, 186 aa, Neisseria
MSYQDILRGLLPPVSYARNAPRVRAQAEIDGAALDAVAESAQSVADAVDPRSAGQMLADWERVLGLDGTGKNRQHRVLAVMAKLNETGGLSIPYFVRLAEAAGYQIQIDEPQPFRAGVNRAGDRLAPQEIMWVWHVNVRGGNNRITRFRAGISAAGDRLTDYSDAVIESLFNRLKPAHTAIRFTYR

SEQ ID NO: 1675 - protein, 657 aa, Neisseria
MHPIETPDKTFHDGDGVSELGTILPAWWLNQVQSELLAVLTAAGIQPDKSQPNQLLAALNRLAVVITGDQTVNGQKTFTAQTQFQSGIHLSANQTNWNGGHKAYIGADADNAHIVFGDDTLRLHGANNRISYNNHDIFHKANKPRFAEDIQGKPNTLSGYGIGNFKVETFRGDLNTLKTDGIYSLPTAVGSSNLPVENTACHIQVIAGTKHGWCRQLGYPAYTSDVYERHQTSSANDNWSAWKKLNSDGIPVGAIVSFPKAVQNPAGYLKANGTTFAQNTFPDLYRALGNSNRLPDLSRTDIGITAWFPSDQIPTGWLAFDDIRTRVTETAYPELYRLLTGKYGSIQNVPQAEDRFIRNAGNSLAVGTKQEDEIKRHVHKVFSHWTNHTDAAALGYEDRNERQRSALVSTWTDENLNDNGFLTPRSDSKMATGGDENRPKALVLKLCIKAADTLGEAVFWIKSHGETINAGALDAGTLAQGLQDKADRDHTHTAAQIQGLDEKISTAVAAQFTRQTIGGVDIVRFPDGTMIQTGSYRFTRSGGPIENEVVFPVAFADGNVKCFVSERHSERVTGDRRQHNWLFIRAKNHAAAIITNWYEGSCDWMAIGKAASGNAASSPIGPEIPETNEEPQRESGRTSTGPRNRRRRDGLLEALQD

SEQ ID NO: 1676 - protein, 175 aa, Neisseria
MPRQSCHSSSFPPLSSFPRKRESRPPDATGIYRKNRNPRHRHSRESGNPAPKRGRNLSEKTETPAAVIPAQAGIQTPNAAGIYRKKQKSPPPSFPRRRESRPQTRQESIGKNRPPATVIPAQAGIQTPNAAGIYRKRLKPNGLDSRLRGNDGGRGFGIPAFAGMTESGGNNERRE

SEQ ID NO: 1677 - protein, 49 aa, Neisseria
MQKRNTGKTPKQLVTIRLSADVVEKFRAGGKGWQTRINEVLRQYIAQLK

SEQ ID NO: 1678 - protein, 95 aa, Neisseria
MKIEFDSEKNQRNIEERNLPFESVGQIRWTTAVIVPDVRFDYPEPRYVAAAYLGDTQRLHIVCFTPIKDGIRVISFRKANKREVKKYATSILNKR

SEQ ID NO: 1679 - protein, 201 aa, Neisseria
MTIYFKNGFYDDTLGGIPEGAVAVRAEEYAALLAGQAQGGQIAADSDGRPVLTPPRPSDYHEWDGKKWKISKAAAAARFAKQKTALAFRLAEKADELKNSLLAGYPQVEIDSFYRQEKEALARQADNNAPTPMLAQIAAARGVELDVLIEKVIEKSARLAVAAGAIIGKRQQLEDKLNTIETAPGLDALEKEIEEWTLNIG

SEQ ID NO: 1680 - protein, 98 aa, Neisseria
MDAKHRLKKYVYHLLVAIDQLFNALTGGAADETLSSRTYRRARLAQKPKTRWKILYTLINGVFFDRHHCRQAYISELKGRQHDARFNQSRAAGEKGTR

SEQ ID NO: 1681 - protein, 65 aa, Neisseria
MRILILASRTAQNRAAGFNIRTRFGFCILQNPNLLFKFKLNSGVVVWYSGLTKIRTRRRSRRQYK

SEQ ID NO: 1682 - protein, 215 aa, Neisseria
MKPLILGLAAVLALSACQVQKAPDFDYTSFKESKPASILVVPPLNESPDVNGTWGVLASTAAPLSEAGYYVFPAAVVEETFKQNGLTNAADIHAVRPEKLHQIFGNDAVLYITVTEYGTSYQILDSVTTVSAKARLVDSRNGKELWSGSASIREGSNNSNSGLLGALVSAVVNQIANSLTDRGYQVSKTAAYNLLSPYSHNGILKGPRFVEEQPK

SEQ ID NO: 1683 - protein, 123 aa, Neisseria
MMNPKTLSRLSLCAAVLALTACGGNGQKSLYYYGGYPDTVYEGLKNDDTSLGKQTEKMEKYFVEAGNKKMNAAPGAHAHLGLLLSRSGDKEGAFRQFEEEKRLFPESGVFMDFLMKTGKGGKR

SEQ ID NO: 1684 - protein, 223 aa, Neisseria
MKTVSTAVVLAAAAVSLTGCATESSRSLEVEKVASYNTQYHGVRTPISVGTFDNRSSFQKGIFSDGEDRLGSQAKTILVTHLQQTNRFNVLNRTNLNALKQESGISGKAHNLKGADYVVTGDVTEFGRRDVGDHQLFGILGRGKSQIAYAKVALNIVNVNTSEIVYSAQGAGEYALSNREIIGFGGTSGYDATLNGKVLDLAIREAVNSLVQAVDNGAWQPNR

SEQ ID NO: 1685 - protein, 239 aa, Neisseria
MATLSDKTILVTGASQGLGEQVAKAYAAAGATVILVARHQKKLEKVYDAIVEAGYPEPFAICFDLISAEEKEFEHFAATIAEATQGKLDGIVHCAGYFYALSPLDFQTVAEWVNQYRINTVAPMGLTRALFPLLKQSPDASVIFVGESHGETPKAYWGGFGASKAALNYLCKVAADEWERFGNLRANVLVPGPINSPQRIKSHPGEAKSERKSYGDVLPAFVWWASAESKGRSGEIVYL

SEQ ID NO: 1686 - protein, 437 aa, Neisseria
MMNTPHPRPKIAVIGAGWAGLSAAVTLARHADVTLFEAGRQAGGRARTLAGNTDGFGFLDNGQHILLGAYRGVLRLMKTIGSDPRAAFLRVPLHWHMHGGLQFRALPLPAPLHILGGVLLARRAPTAFKAKLLADMSDLQKSARLGQPDTTVAQWLKQRNVPRAAVMQFWQPLVWGALNTPLETASLRVLCNVLSDGVLTKKSGSDYLLPKQDLGAIVAEPALADLQRLGADIRLETRVCRLNTLPDGKVLVNGEAFDAAVPATAPYHAAALLPEGTPEHVQTAYQNLRYHAITTVYLRYAEPVRLPAPLTGLADGTVQWLLCRGRLGLPENEVSAVISVSDRVGAFANRAWADKAHADLKRILPHLGEPEAVRVITEKRATTAADAPPPDLSWLHRHRIFPAGDYLHPDYPATLEAAVQSGFASAEACLQSLSDAV

SEQ ID NO: 1687 - protein, 68 aa, Neisseria
MKAVRDIALWLAVTVWINFFPDSYRYDTVPQGRYGYWHADHPWYPYARFLLPLFLACILFYRHFRKRK

SEQ ID NO: 1688 - protein, 290 aa, Neisseria
MKGLDYCRQKAEESRSSFLSGFRFLTQEKRDAVTVLYAFCRELDDVVDECSNPDVAQATLNWWRGDLDKVFGGAMPEHPVNQALRQVKETFKLPKYELEALIDGMQMDLVQARYGSFEELKLYCHRVAGVVGCLIARILGFSDDQTLEYADKMGLALQLTNIIRDVGEDARRGRIYLPMEEMRRFDVPASVILQCSPTGNFAELMAFQIKRARETYREAVSLLPDADKKAQKVGLVMAAVYYELLNEIDRDGAQNVLKYKIALPSPRKKRIALKTWLFGFKPRPGTPERA

SEQ ID NO: 1689 - protein, 620 aa, Neisseria
MALLQISEPGMSAAPHRHRLAAGIDLGTTNSLVATVRSGSAACLPDAEGRVTLPSVVRYLENGGIEVGKTALSAQKTDPLNTVSSAKRLIGRTLADLHQNTHYLPYRFGDNQRVIELHTRQGVKTPVEVSAEILKTLKSRAEETLGGDLVGVVITVPAYFDDAQRQATKDAARLAGLNVLRLLNEPTAAAIAYGLDNASEGTFVVYDLGGGTFDVSVLQLTKGLFEVKATGGNSALGGDDFDHRLFCRLLEQNGLSQLNEQDSQLLLSLVRAAKEQLTTQTEARIQATLSDGMAIDTSISRAEFHNLTQHLVMKTLEPVTQALKDAGVGKNEVKGVIMVGGSTRMLHVQQAVATFFGQTPLNNLNPDEVVALGAAIQANVLAGNKTDGEWLLLDVTPLSLGLETYGGLAEKIIPRNSTIPTARAQDFTTFKDGQTAMTIHVVQGERELVADCRSLAKFTLRGIPPMAAGAARIRVTFQIDADGLLSVSAQEQSTGVQAQIEVKPSYGLDDDTITQMLKDSMSNAAEDMAARARAEAVVEAESLTDAVNAALELDSDLLDAEELQQIRQGIADLQGRLKDGKAEDIRAAAAKLGSITDNFAAKRMNRNIQRALTGQSVDNI

SEQ ID NO: 1690 - protein, 218 aa, Neisseria
MEKSGIVYLMKTVIKGVYKIGISDVSNFEGRMRHLENNGYANVAGLERILAVKTDNYKEKENLLHEIFSKSRIGDTELFAVDENLVKRLFLSLRGEIVFPKNETAESEFEKSVHERRQEGNAGSGRKQLLDLVRRGHREYPYALPRLLAGAAFYKPKKSKIRLFKEAYFGKSGTRLTDEIADGIHIYTCFSRADLEKAYSEYLELFKSESDAEGRKPQ

SEQ ID NO: 1691 - protein, 253 aa, Neisseria
MMGDSVIYYVEQADEPVNRADERARKTFKYFWRELFWERRRIISALDFAMVKVPFFQDGEDGEICEHMWIDDIYFDGLYIYGVLNNEPGELTNVEQGESVCVPVDDISDWMFVCNGIPYGGFTIQAMRGQMTEEERTEHDAAWGIDFGDPGQILLVYEEKEHPENLEEHPMCRNCIDDFRQQLSQNSDYLREQDEDGYTPLHHEAIAGNALMVQAMLEYGANPASTTSEGYTALDFACLTGWQNVADLLEPRH

SEQ ID NO: 1692 - protein, 113 aa, Neisseria
MPKITVLPHTTLCPEGAVIDNAPEGKTVLDVLLDHDIEVDHACEKSCACTTCHVIIRKGFDSLEEPTELEEDLLDQAWGLEADSRLSCQAVVAGEDLIVEIPKYTINHAREEH

SEQ ID NO: 1693 - protein, 47 aa, Neisseria
MHRYLSVLQPEKPPAGYSGLNLNQYSVASPCRTICTVCGSPPCPDFC

SEQ ID NO: 1694 - protein, 227 aa, Neisseria
MTRCGIRDGLCFFLPACRIFPSLRETERDGGAADKLEIASFKLRTGGGHAFYRNRETAARPGKAFRNLRVDEPTLGAQHCRIATGSRFIQGNQVAPVLVVKANRYSGEDMLPVQYLIQFAYQQNQAVKLLHLRQGIRMVGSGINQFGQFCGKHIVHQSSLSVETPLFGAVESDLFGRDNSSQIRTTHRLVLDVLSGELKHSAILKGRQFCRNIFYTASMPDDKRKFI

SEQ ID NO: 1695 - protein, 65 aa, Neisseria
MKWTDTQRIAEELYDLHGETIDPRTVRFTQLRDLIMALPEFDDDPARCGERILEAVQQAWIDEAE

SEQ ID NO: 1696 - protein, 133 aa, Neisseria
MKDKHDSSAMRLDKWLWAARFFKTRSLAQKHIELGRVQVNGSKVKNSKTIDIGDIIDLTLNSLPYKIKVKGLNHQRRPASEARLLYEEDAKTATLREERKQLDQFSRITSAYPDGRPTKRDRRQLDRLKKGDW

SEQ ID NO: 1697 - protein, 319 aa, Neisseria
MKPVFLDFEQPIAELTNKIDELRFVQDESAVDISDEIHRLQKKSNDLTKSIFSKLTPAQISQVSRHPQRPYTLDYIEALFTDFEELHGDRHFADDYAIVGGLARFNGQSVMVVGHQKGRDTKEKIRRNFGMPRPEGYRKALRLMKTAEKFGLPVMTFIDTPGAYPGIGAEERGQSEAIGKNLYELTRLRVPVLCTVIGEGGSGGALAVALGDYVNMLQYSTYSVISPEGCASILWKTAEKAADAAQALGITADRLQKLDLVDTVIKEPLGGAHRDFGQTMKNVKAVLEKQLHEAQSIPLADLLSRRFDRIMAYGKFSEQ

SEQ ID NO: 1698 - protein, 426 aa, Neisseria
MKDCFPQGLNGKKTAVALSGGLDSVVLLHLLVRAGKKGGFIPDALHIHHGLSPRADDWADFCQNYCDMLGVGLETVKVCVEKNGLGIEAAARQKRYAAFAEKGFDVLALAHHRDDQIETFMLAVARGGGLRALAAMPAVRPFGEKGIIWRPLLPFSRQDIWDYAQKHGLPNIEDESNTDTAYLRNRFRHRILPELSAQIPHFGRHVLNNVRALQEDLALLDEVVVQDCRWVCGAGYFDTARWLTFSPRRKTHILRHFLKENGIPVPNQNALADIARVLTEAKTGRWNLQGFELHHYAGRLFVFRLEKTDKLRFLKDRQISGNLREILTGQGFVLKRHPFGLPEHLLEQDGILRTVAASDTLAMGGIHKDVKKILQGKRVLPVLRPIWPLVADSGNRPLALANCCADFQYSVSDGILPVHPDFPILF

SEQ ID NO: 1699 - protein, 203 aa, Neisseria
MPSEEVRKLTAVLPEDGFFSVSDGILKKISSLTCADDVLALIDIPDAGALPAGGDCVVLDGVQDPGNVGTVLRSAAAAGIGAVILGKGCADAWSPKVLRAGMGAHFLSEIYPQADLEIWLVRYKGRVFATALREEKQAVLYGEDLCEPTAWVFGNEGAGVGKAVLDRADKCVRIPMHDATESLNVAMAATICLFEQMRQRAAY

SEQ ID NO: 1700 - protein, 78 aa, Neisseria
MYRFYAAVAVFLCGCFEAQEGGIAEGRAVETHLIVQCRGGGGFGLGVVEMVLTDIAQNRANGIRTNKEFGKKFVKSTN

SEQ ID NO: 1701 - protein, 121 aa, Neisseria
MWGRYEKLRIFYDPTRAIYDSGADYLTREKHRLVVIANSAWGLLLNLSCYYDEVLEKRKIPFGKQEIDDDMDKVSALKRKFKDISEIKVGDGWEYPFNYEQGMKELDEVLLKYIPFFEEER

SEQ ID NO: 1702 - protein, 101 aa, Neisseria
MRVSKIIGSMLLVTAVQTVFSANVYACRHNGKTSYSQTPGKHCTNAGLGRDRVYSSVRPAVKDRAEDAGVGDYSDTVRDEHVQNPKGNAQKDGSAAGIKPH

SEQ ID NO: 1703 - protein, 458 aa, Neisseria; identical to SEQ ID NO: 434

SEQ ID NO: 1704 - protein, 350 aa, Neisseria
MTVSPVALRRKTECKPHPTARYWKKCDVEALFGLPFLDLIYQAAEIHRQNFNPREIQLSTLLSIKTGGCPEDCAYCPQSAHHNTNLGKEQMMDVDEIVEKAKIAKSRGASRFCMGAAWRGPKPKDVETVSAIIKAVKGLGMETCGTFGMLEEGMAEDLKEAGLDYYNHNLDTDPDRYNDIIHTRQHEDRMDTLGKVRNAGLKVCCGGIVGMNETRAERAGLIASLANLDPQPESVPINRLVKVEGTPLADAEDLDWTEFVRTIAVARITMPQSYVRLSAGRSNMPEAMQAMCFMAGANSIFYGDKLLTTGNPDEDGDRILMEKLNLYPLQFEPEGEVAEVEKASGIKVDY

SEQ ID NO: 1705 - protein, 211 aa, Neisseria
MNIKYSGIENRFETAILKKNGVRSGFVSFAPNLAAVKLNDYAKVRKRITKTKQKADIVIVMFHGGAEGKQAEHLPFDTEIFYGENRGNVVEFARLAVDSGADVVFGQGPHVTRAVELYRDRFISYSGGNFATYGAINTSGISGIAPIFKIITDKQGRFVSGNIIPITQVGDKIPKIDPEKTVIGRIIYLNRSDFPKGNGLDVSPDGSITRR

SEQ ID NO: 1706 - protein, 51 aa, Neisseria
MSPTPIMETVSAVFSSGASCPSTSPVFETGAGFEPSIGSTGIPFRQDAPRA

SEQ ID NO: 1707 - protein, 47 aa, Neisseria
MHSIFWGFAHFFGVPPSSNSVPSRLPTVMSASCKADSTFFRILVSGR

SEQ ID NO: 1708 - protein, 619 aa, Neisseria
MPEYRSKTSTHGRNMAGARALWRATGVMETDFGKPIIAVANSFTQFVPGHVHLHNMGQLVAREIEKAGAIAKEFNTIAIDDGIAMGHSGMLYSLPSRDLIADSIEYMVNAHCADALVCISNCDKITPGMLIAAMRLNIPTIFVSGGPMEAGKVIGVANIQPERRLDLIDAMIESADDNVSNRQVEEVEQNACPTCGSCSGMFTANSMNCLTEALGLSLPGNGSYLATHAGRKELFLEAGRMIVEITKRYYEQNDETVLPRSIATKKAFENAMTMDIAMGGSTNTILHLLAVANEAGVDFKMADIDRLSRVVPCICKTAPNNHDYYMEDVHRAGGIFAILKELDKAGKLHTDVHTIHAPTLKDAIEQWDVTNPENTRAIERFKAAPGGVRTTQAFSQNRMWKTLDLDREKGCIRDVAHAYSQDGGLAVLFGNIAERGCVVKTAGVDESILKFTGRARVFESQEDAVEGILGNQIVAGDIVIIRYEGPKGGPGMQEMLYPTSYLKSKGLGKACALLTDGRFSGGTSGLSIGHASPEAAEGGAIGLVHEGDTVEIDIPNRSIHLAISDEELAARRAEMEARGSKAWKPKNRDRYVSAALRAYGAMATSADKGAVRDVAQIER

SEQ ID NO: 1709 - protein, 589 aa, Neisseria
MTVQTKTKGLAWQEKPLSDNERLKTESNFLRGTILDDLKDPLTGGFKGDNFQLIRFHGMYEQDDRDIRAERAEAKLEPLKFMLLRCRLPGGIIKPSQWIELDKFARENSHYRSIRLTNRQTFQFHGVPKAKLQTMHRLLHKLGLDSIATAADMNRNVLCTSNPIESELHRQAYEYAKKISEHLLPRTRGYLDVWVDGKKVQSSDDFLQEDEPILGKTYLPRKFKTAVVIPPLNDVDCYGNDLDFVAVSDGNGQLAGFNVLAGGGLSMEHGNTKTYPNISLELGFVPPEHALKAAEAVVTTQRDFGNRSDRKNARTRYTIQNMGLDNFRAEVERRMGMPFEPVRPFKFTGRGDRIGWVKGIDGNWHLTLFIESGRLVDEGGKQLLTGVLEIAKIHKGDFRITANQNLIVANVAEADKAKIEEFARTYGLIRNDVSKLRENAMSCVSFPTCPLAMAEAERVLPDFIGELDKIMAKHGTSDDYIVTRITGCPNGCGRAMLAEIGLVGKAVGRYNLHIGGDREGVRIPRLYKENITLPEILAELDDLIGKWAAERNIGEGFGDFAIRTGIVKPVLNAPVDFWDASKAVAIARA

SEQ ID NO: 1710 - protein, 604 aa, Neisseria
MSEHDMQNTNPPLPPLPPEITQLLSGLDAAQWAWLSGYAWAKAGNGASAGLPALQTALPAAEPFSVTVLSASQTGNAKSVADKAADSLEAAGIQVSRAELKDYKAKNIAGERRLLLVTSTQGEGEPPKEAVVLHKLLNGKKAPKLDKLQFAVLGLGDSSYPNFCQAGKDFDRRFEELGAKRLLERVDADLDFTASANAWTDNIAALLKEEAAKNRATPAPQTTPPAGLQTAPDGRYCKAAPFPAALLANQKITARQSDKDVRHIEIDLSGSDLHYLPGDALGVWFDNDPALVREILDLLGIDPATEIQAGGKMMPVARALSSHFELTQNTPAFVKGYAAFAHYEELDKIIADNAVLQDFVQNTPIVDVLHRFPASLTAEQFIRLLRPLAPRLYSISSAQAEVGDEVHLTVGVVRFEHEGRARTGGASGFLADRLEEDGTVRVFVERNDGFRLPEDSRKPIVMIGSGTGVAPFRAFVQQRAAENAEGKNWLIFGNPHFARDFLYQTEWQQFAKDGFLHRYDFAWSRDQEEKIYVQDKIREQAEGLWQWLQEGAHIYVCGDAAKMAKDVEAALLDVIIGAGHLDEEGAEEYLDMLREEKRYQRDVY

SEQ ID NO: 1711 - protein, 428 aa, Neisseria
MTAQHQTPLRFITAGSVDDGKSTLIGRLLYDSKALLSDQIKTLESGKSKGLKEAIDFSILTDGLEAEREQGITIDVAYRYFSTAKRKFIIADTPGHEQYTRNMVTGASTASAAVVLVDASQLDFGAQPLQLLPQTKRHSAILRQLNCPHIVVAVNKMDLLDYSEDKFNAIVEAYRRLAEQLGLKDAHFVPMSALLGDNIVYPGGNMPWYKGEPLLSILETLPGADEVSRTADDFYFPVQLVVRQDADKADDFRGYQGRIERGSVAVGQTVRIEPNGLTAEVSEIITPKGEVAQAFAGEAATLRLDRDIDVSRGDLFVDKNSPLAPQKHLEATLCWFDERPLNTARKYLLKHGTQTVPAKVGEIESVLDVRTLEQEAGAESLKMNDIAKVRINLQKPVTATPYAENTAAGSFILIDEATYGTVAAGMIL

SEQ ID NO: 1712 - protein, 307 aa, Neisseria
MTKTEPNNAQLDWLESESIHIIREVAAECENPALLFSGGKDSVVLLALACKAFRLGSRPVKLPFPLVHIDTGHNYPEVIAFRDAQAAKLNARLIVGRVEDSIAKGTVVLRKETDSRNAAQAVTLLETIEANGFDALMGGARRDEEKARAKERIFSFRDEFGQWDPKAQRPELWSLYNTRLHKGENMRVFPISNWTELDIWQYIARENLELPPIYYSHRREVVRRRGLLVPVTPLTPKMPSETSEILDVRFRTVGDISCTCPVESTASTPTEIIRETAVADISERSATRLDDQASEAAMEKRKKEGYF

SEQ ID NO: 1713 - protein, 246 aa, Neisseria
METTLFKPALWQIPHIGSGGETALAEKTETLKQRLHRIVGSHRDARFASSLAAEDMVITDLIAGENLNIGIFTLDTGLLHTETLNLLDRLGRAYPHLRIKRFRPVREDADRYVESKGRFAFYDSVEARRECCRIRKTEPLNRAIAGADAWLTGQRREQSATRTELPFAEYDAGRGIGKYNPIFDWSEHDVWAYILANNVPYNDLYRQGFPSIGCDPCTRPVKAGEDIRAGRWWWEGRNSKECGLHK

SEQ ID NO: 1714 - protein, 483 aa, Neisseria
MNYFPIFANLAGRPVLVVGGGAVAARKISLLLKAGAEVRVAAKHLNAELSALAAENKILWLAEEFRAEHIRTVFLIIAASSDQALNRRVFHLAESCQKPVNVVDDRDHCSFIFPSVIDRNPVQIAVSSSGSAPVLARLLRERLEALLPPSLGDMAEISGRWRDAVKGKLKSVTERRRFWEKQFNGRFAALVKNRQNTLAERELAGQLEQSRQNDQGGSVSLVGAGPGDAGLLTLKGLQEIQQADVVLYDALVSDGILSLVRRDAERIFVGKRARGERTPQEDTNALMVRLAREGRRVVRLKGGDPFVFGRGGEELETLARHQIPFSVVPGITAAVGATAYAGIPLTHRDYAQSAVFVTGHRKADAPDIEWQTLARSRQTLVIYMGALKAALIAERLQQHGRSPDTPAAVISQGTLPAQKTATGTLANLAELAETAPNPALIVIGEVVGLHEKLAWFGENGEGENRVGQTYPALGGLNAGQRAA

SEQ ID NO: 1715 - protein, 52 aa, Neisseria
MPSEALFALRTASPHHANGLNARNGFRPFFFRNRYKTENRRIRSRPHIAFSF

SEQ ID NO: 1716 - protein, 218 aa, Neisseria
MKNKTKVWDLPTRLFHWLLAASLPFMWYSAKAGGDMLQWHTRVGLFVLFLLVFRLCWGIWGSDTARFSRFVQGWAGIRGYLKNGIPEHIQPGHNPLGALMVVALLAAVSFQVGTGLFAADENTFSTNGYLNHLVSEHTGSLMRKIHLNFFKLLAVFSAIHIAAVAAYRVFKKKNLILPMITGFKYIEGKTSIRFAGKAALAAALSVASLAAAAILLLS

SEQ ID NO: 1717 - protein, 296 aa, Neisseria
MFPVFHLSGESRRQMLQTALRFPHVFKARAEDSHKGTFGTLAVVGGSAGMSGAPVLAASAAMYLGCGKVWAGFNQDTLPFAVIAGFPEIMLDTADSLAKRQDINAWVVGCGLGTGRAAVGTLAGILTEHTDKPVVLDADALNILSTDAETRNLARGCKNLILTPHPAEAARLLGTTVAQVQADRTAAVRKIGAIFGATVVLKGHKTLVASPDTEIYVNESGNAGLATAGSGDVLGGIIGSLLAQGVPVFEAACAGAWLHGAAADVIKESAGIAAGLLAGEIAPAARWLRNRITKSM

SEQ ID NO: 1718 - protein, 65 aa, Neisseria; identical to SEQ ID NO: 1681

SEQ ID NO: 1719 - protein, 215 aa, Neisseria; identical to SEQ ID NO: 1682

SEQ ID NO: 1720 - protein, 123 aa, Neisseria; identical to SEQ ID NO: 1683

SEQ ID NO: 1721 - protein, 223 aa, Neisseria; identical to SEQ ID NO: 1684

SEQ ID NO: 1722 - protein, 239 aa, Neisseria; identical to SEQ ID NO: 1685

SEQ ID NO: 1723 - protein, 437 aa, Neisseria; identical to SEQ ID NO: 1686

SEQ ID NO: 1724 - protein, 63 aa, Neisseria
MIQTVTASHKAISLTAFIYFCSCLNSQQFHFKARTPTGLRGYDADFQTMVETPSGGAVGIGFA

SEQ ID NO: 1725 - protein, 290 aa, Neisseria; identical to SEQ ID NO: 1688

SEQ ID NO: 1726 - protein, 620 aa, Neisseria; identical to SEQ ID NO: 1689

SEQ ID NO: 1727 - protein, 218 aa, Neisseria; identical to SEQ ID NO: 1690

SEQ ID NO: 1728 - protein, 253 aa, Neisseria; identical to SEQ ID NO: 1691

SEQ ID NO: 1729 - protein, 113 aa, Neisseria; identical to SEQ ID NO: 1692

SEQ ID NO: 1730 - protein, 47 aa, Neisseria; identical to SEQ ID NO: 1693

SEQ ID NO: 1731 - protein, 227 aa, Neisseria; identical to SEQ ID NO: 1694

SEQ ID NO: 1732 - protein, 65 aa, Neisseria; identical to SEQ ID NO: 1695

SEQ ID NO: 1733 - protein, 133 aa, Neisseria; identical to SEQ ID NO: 1696

SEQ ID NO: 1734 - protein, 319 aa, Neisseria; identical to SEQ ID NO: 1697

SEQ ID NO: 1735 - protein, 426 aa, Neisseria; identical to SEQ ID NO: 1698

SEQ ID NO: 1736 - protein, 203 aa, Neisseria; identical to SEQ ID NO: 1699

SEQ ID NO: 1737 - protein, 78 aa, Neisseria; identical to SEQ ID NO: 1700

SEQ ID NO: 1738 - protein, 121 aa, Neisseria; identical to SEQ ID NO: 1701

SEQ ID NO: 1739 - protein, 101 aa, Neisseria; identical to SEQ ID NO: 1702

SEQ ID NO: 1740 - protein, 458 aa, Neisseria; identical to SEQ ID NO: 434

SEQ ID NO: 1741 - protein, 350 aa, Neisseria; identical to SEQ ID NO: 1704

SEQ ID NO: 1742 - protein, 211 aa, Neisseria; identical to SEQ ID NO: 1705

SEQ ID NO: 1743 - protein, 51 aa, Neisseria; identical to SEQ ID NO: 1706

SEQ ID NO: 1744 - protein, 47 aa, Neisseria; identical to SEQ ID NO: 1707

SEQ ID NO: 1745 - protein, 619 aa, Neisseria; identical to SEQ ID NO: 1708

SEQ ID NO: 1746 - protein, 589 aa, Neisseria; identical to SEQ ID NO: 1709

SEQ ID NO: 1747 - protein, 604 aa, Neisseria; identical to SEQ ID NO: 1710

SEQ ID NO: 1748 - protein, 428 aa, Neisseria; identical to SEQ ID NO: 1711

SEQ ID NO: 1749 - protein, 307 aa, Neisseria; identical to SEQ ID NO: 1712

SEQ ID NO: 1750 - protein, 246 aa, Neisseria; identical to SEQ ID NO: 1713

SEQ ID NO: 1751 - protein, 483 aa, Neisseria; identical to SEQ ID NO: 1714

SEQ ID NO: 1752 - protein, 52 aa, Neisseria; identical to SEQ ID NO: 1715

SEQ ID NO: 1753 - protein, 218 aa, Neisseria; identical to SEQ ID NO: 1716

SEQ ID NO: 1754 - protein, 296 aa, Neisseria; identical to SEQ ID NO: 1717

SEQ ID NO: 1755 - protein, 603 aa, Neisseria
MKQIRNIAIIAHVDHGKTTLVDQLLRQSGTFRANQQVDERVMDSNDLEKERGITILAKNTAIDYEGYHINIVDTPGHADFGGEVERVLGMVDCVVLLVDAQEGPMPQTRFVTKKALALGLKPIVVINKIDKPSARPSWVIDQTFELFDNLGATDEQLDFPIVYASGLSGFAKLEETDESNDMRPLFDTILKYTPAPSGSADETLQLQISQLDYDNYTGRLGIGRILNGRIKPGQTVAVMNHDQQIAQGRINQLLGFKGLERVPLEEAEAGDIVIISGIEDIGIGVTITDKDNPKGLPMLSVDEPTLTMDFMVNTSPLAGTEGKFVTSRQIRDRLQKELLTNVALRVEDTADADVFRVSGRGELHLTILLENMRREGYELAVGKPRVVYRDIDGQKCEPYENLTVDVPDDNQGAVMEELGRRRGELTNMESDGNGRTRLEYHIPARGLIGFQGEFMTLTRGVGLMSHVFDDYAPVKPDMPGRHNGVLVSQEQGEAVAYALWNLEDRGRMFVSPNDKIYEGMIIGIHSRDNDLVVNPLKGKKLTNIRASGTDEAVRLTTPIKLTLEGAVEFIDDDELVEITPQSIRLRKRYLSELERRRHFKKLD

SEQ ID NO: 1756 - protein, 791 aa, Neisseria
MNKNIKSLNLREKDPFLSREKQRYEHPLPSREWIIELLERKGVPSKIESLARELSITEDEYVFFERRLKAMARDGQVLINRRGAVCAADKLDLVKCRVEAHKDGFGFAVPLTPAKDGDFVLYERQMRGIMHGDIVTVRPAGMDRRGRREGTVLDIVERAQSKVVGRFYMDRGVAILEPEDKRLNQSIVLEPDGVARFKPESGQVIVGEIEVYPEQNRPAVAKIIEVLGDYADSGMEIEIAVRKHHLPHQFSEACAKAAKKIPVHVRKSDLKGRVDLRDLPLVTIDGETARDFDDAVFAEKVGRNYRLVVAIADVSHYVRPDDVIDADAQERSTSVYFPRRVIPMLPENLSNGICSLNPDVERLCMVCDMVVTYAGNIKEYRFYPAVMRSHARLTYNQVWKWISDGIDHPYKAQIDTLYKLFKILQKKRFERGAVEFESVETQMIFDDNGKIEKIVPVVRNDAHKLIEECMLAANVCAADFLLKNKHTALFRNHLGPTPEKLATLREQLGLLGLQLGGGDNPSPKDYAALVEQFKGRPDAELLQVMMLRSMQQAVYEPHCDGHFGLAYEAYAHFTSPIRRYPDLTVHRAIKAVLNQQTYTPKKSWQALGVHTSFCERRADDASRDVENWLKTYYMRDKVGEVFEGKISGMTSFGIFVTLDGIHIDGLVHISDLGEDYFNFRPEIMAIEGERSGIRFNMGDRVAVRVARADLDDGKIDFVLIAGGSGRGRKVKSSASAKPAGTAGKGKPKTAAEKKTARGGKVRGRGASAAAESRKKAKKPVPIKVKKRKGKS

SEQ ID NO: 1757 - protein, 487 aa, Neisseria
MRIVEKAYTFDDVLLVPAHSTVLPRDVKLQTKLTREITLNLPLLSAAMDTVTEARLAISMAQEGGIGIIHKNMPPEMQARAVSKVKRHESGVVKDPVTVAPTTLIREVLEMRAQRKRKMSGLPVVENGKVVGIVTNRDLRFENRVDLPVSAIMTPRERLVTVPEGTSIDEARELMHTHKVERVLVLNEKDELKGLITVKDILKTTEFPNANKDSEGRLRVGAAVGTGGDTEERVKALVEAGVDVIVVDTAHGHSQGVIDRVRWVKETYPHIQVIGGNIATAKAALDLVAAGADAVKVGIGPGSICTTRIVAGVGVPQLTAIHNVAEALKGTGVPLIADGGIRFSGDIAKALAAGAYSVMLGGMFAGTEEAPGEIELYQGRSYKSYRGMGSLGAMSQGSADRYFQDKTDSTDKYVPEGIEGRVPYKGPIVNIIHQLTGGLRSSMGYLGCANIAEMHEKAEFVEITSAGMSESHVHDVQITKEAPNYHR

SEQ ID NO: 1758 - protein, 153 aa, Neisseria
MNIIMDSTRKFGILWEENSECNGFIYGKIQIIIGENIYPKICPYGYFTLNAVFNSLKSSFEEKYYAGGNNGLDFGEQLFDIDKYNSLELCNIFSIDTTYMSGGGNCEIDCLVLEMGYSGEEERLFYSFDNGKNFKEIRYKKGTVESVIFQLNL

SEQ ID NO: 1759 - protein, 852 aa, Neisseria
MPANLSSALETFKQQRDAAEAHYLKANRVSVFFREYTAAVETLLAALWAEYFQNSALCLMAVGGFGRGELYPCSDVDLAVVSPAPLSDGIQEQIARFVQTLWDCKLMPSVKSGSVDELCESVRNDITGDTAFLEARFLFGNRQTVDKLAEKMNAQRNVAAFVEAKLVEMEHRHAKSQGSGAVLEPNIKSCPGGLRDIHTLLWIAKAQGLATDLPDLLKQRILTRAEAGMLSHGYRRLAHIRIHLHLNAKRAEDRLLFDLQPQVAESMGYEGLNLRRQSEELMRVFYRAIKTVKQLGGILTPMLQSRVSSTPLRVTLRIDDDYIQVNNQIAARHTDIFFRRPEHIFKIVEIMQQRNDITALEPQTLRAWWGATRKINRSFYQNPENRRRFAGFFRNGNGLTQTLRFLNLYGVLGRYLPAWEKIIGLLQHDLFHIYPVDDHILTVVRNVRRLALDMHSHELPYASALMQSFEKQDILYLAAFFHDIAKGRGGDHAIQGIADARQFAADHFLTGEESDLLAWLVENHLLMSAVAQKEDIQDPSVLDAFCKRVQTHERLSALYLLTISDIRGTNPKLWNAWRASLLESLFHAAGRYLTGNGGNPHTLFGRRRQEAADLLTRAAVPEKQQKKLWNALGSAYFARHQSREILWHAANLVHDFETPIVRSRILPKSDSFQVMVFMPNGPRLFARLCRIFSRHGFDILAARAFITEHDYILDTFIVQIPSQHAPEDYPDIQSALEAELNSFIHGHTVAETQSRSRRISRRSRYMPIAPSITITPEEDYPDWYSVEITAVNRPFLLADMAEVFFAHNVSLRYAKISTLDERAEDSFTVFSPDLKNPKIQSSLKQTLLEQLS

SEQ ID NO: 1760 - protein, 106 aa, Neisseria
MMGNKLTLPAELPDEQDLRAVLAYNMRLFRVNKGWSQEELARQCGLDRTYVSAVERKRWNIALSNIEKMAAALGVAAYQLLLPPQERLKLMTNSADTRQMPSESGI

SEQ ID NO: 1761 - protein, 48 aa, Neisseria
MKFRVLVCCFPICLDFISFLLMCVCLGVAAATPFFWLLCEVKSVTANA

SEQ ID NO: 1762 - protein, 157 aa, Neisseria
MKGDRLVIRELNKNLGLLLVTINQYFLHARILKNWGFEELGEHFFKQSIVEMKAADDLIERILFLEGLPNLQELGKLLIGESTEEIIACDLTKEQEKHEALLAAIATAEAQQDYVSRDLLEKQKDTNEEHIDWLETQQELIGKIGLPNYLQTAAQED

SEQ ID NO: 1763 - protein, 154 aa, Neisseria
MQGNQAVVDYMNELLSGELAARDQYFIHSRLYSEWGYTKLFERLNHEMEEETTHAEDFIRRILMLGGTPKMARAELNIGTDVVSCLKADLQTEYEVRDALKKGIKLCEEAQDYVTRDLMVAQLKDTEEDHAHWLEQQLRLIELIGEGNYYQSQL

SEQ ID NO: 1764 - protein, 67 aa, Neisseria
MRALYAKAVGMTNFLFKIQTIIKRNRAYSPMPSKSVCCFLSVFLLLKLRIHLIHKEHLHLLTIAKNK

SEQ ID NO: 1765 - protein, 67 aa, Neisseria
MPSEGLSDGMPARTDAAWSGCRFEGVFNAKGNLSYDVFAAGALKKPGILGRSARLPGSISAIYSKPY

SEQ ID NO: 1766 - protein, 155 aa, Neisseria
MKIENIDIISPELFPQETFNETEAFGALVWLWAVSPIYQHAGVQEAAVNILPVLKNGQFALFSSNGHPVAYCTWAYFDEETEWQYLQSNDVLRHSENWCSGNRMWLINWFAPFGDSRMMKRILVHLFPKREIRWLYHRGSEKGKRIMRFPALSKQ

SEQ ID NO: 1767 - protein, 80 aa, Neisseria
MKYIVSISLAMGLAACSFGGFKPPPDDSVYWKYSRIEQEYPAMMSKNINLRIYSYEEYSKQIDDLFAKEKKTGKSAAMTQ

SEQ ID NO: 1768 - protein, 112 aa, Neisseria
MKYIVSISLAMGLAACSFGGFKPNPWDAASFWELKNYANPYPGSASAALDQYPSKARRRQLKDMQECGYDPIDGGKSEADACLRKKGWCRKGFDPYPENKKYEWPREEGKTK

SEQ ID NO: 1769 - protein, 120 aa, Neisseria
MKYIVSISLAMGLAACSFGGFKPPPDDSAFWRLTNYAKLYPGLTSATLDQYPPEERRRQLHDSFAREKKDWKECGYDPIGGGGGSEADACMRKRGWYRVGNDIYPENKKYEWPREEGKTK

SEQ ID NO: 1770 - protein, 2273 aa, Neisseria
MNKRCYKVIFNKKRSCMMAVAENVHRDGKSMQDSEAASVRVTGAASVSSARAAFGFRMAAFSVMLALGVAAFSPAPASGIIADKSAPKNQQAVILQTANGLPQVNIQTPSSQGVSVNRFKQFDVDEKGVILNNSRSNTQTQLGGWIQGNPHLARGEARVIVNQIDSSNPSLLNGYIEVGGKRAEVVVANPSGIRVNGGGLINAASVTLTSGVPVLNNGNLTGFDVSSGKVVIGGKGLDTSDADYTRILSRAAEINAGVWGKDVKVVSGKNKLDFDGSLAKTASAPSSSDSVTPTVAIDTATLGGMYADKITLISTDNGAVIRNKGRIFAATGGVTLSADGKLSNSGSIDAAEITISAQTVDNRQGFIRSGKGSVLKVSDGINNQAGLIGSAGLLDIRDTGKSSLHINNTDGTIIAGKDVSLQAKSLDNDGILTAARDVSVSLHDDFAGKRDIEAGRTLTFSTQGRLKNTRIIQAGDTVSLTAAQIDNTVSGKIQSGNRTGLNGKNGITNRGLINSNGITLLQTEAKSDNAGTGRIYGSRVAVEADTLLNREETVNGETKAAVIAARERLDIGAREIENREAALLSSSGDLHIGSALNGSRQVQGANTSLHNRSAAIESSGNIRIATKDLQNTNEHLRFHTEETHREHRIEYQAEGRTERYPEGSQKELGWEIFEDESLHMRTPDGSPHSVWYKYDYERITAESKITESKPGQIISGGNLVLDAAKLKNHNSRIIAGGRLIVGTPESALDNDETLGTKTITDKGDLHRYHRHHKKGRDSTGYSRSPYEPAPEVSSIRMGISAYKGYAPQQASDIPGTVVPVVAENGIHPTFTLPNSSLFAIAPNNKGYLIETDPAFTDYRKWLGSGYMLAALQQDPNHIHKRLGDGYYEQKLVNEQIAKLTGYRRLDGYTNDEEQFKALMDNGITIAKELQLTPGIALSAEQVARLTSDIVWLENETVTLPDGTTQTVLKPKVYVRARPKDMNGQGALLSGSVVDIGSGAIENRGGLIAGREALILNAQNIKNLQGDLQGKNIFAAAGSDITNTGSIGAENALLLKASNNIESRSETRSNQNEQGSVRNIGRVAGIYLTGRQNGSVLLDAGNNIVLTASELTNQSEDGQTVLNAGGDIRSDTTGISRNQNTIFDSDNYVIRKEQNEVGSTIRTRGNLSLNAKGDIRIRAAEVGSEQGRLKLAAGRDIKVEAGKAHTETEDALKYTGRSGGGIKQKMTRHLKNQNGQAVSGTLDGKEIILVSGRDITVTGSNIIADNHTILSAKNNIVLKAAETRSRSAEMNKKEKSGLMGSGGIGFTAGSKKDTQTNRSETVSHTESVVGSLNGNTLISAGKHYTQTGSTISSPQGDVGISSGKISIDAAQNRYSQESKQVYEQKGVTVAISVPVVNTVMGAVDAVKAVQTVGKSKNSRVNAMAAANALNKGVDSGVALYNAARNPKKAAGQGISVSVTYGEQKNTSESRIKGTQVQEGKITGGGKVSLTASGAGKDSRITITGSDVYGGKGTRLKAENAVQIEAARQTHQERSENKSAGFNAGVAIAINKGISFGFTAGANYGKGYGNGDETAYRNSHIGSKDSQTAIESGGDTVIKGGQLKGKGVGVTAESLHIESLQDTAVFKGKQENVSAQVTVGYGFSVGGSYNRSKSSSDYASVNEQSGIFAGGDGYRIRVNGKTGLVGAAVVSDADKSKNLLKTSEIWHKDIQNHASAAASALGLSGGFSYSPKPTSGQYSTKKEAEIGKIGGKPVSLMRFDQVSAKDDELNEKYRSERIEKGETFKEANLNQNNAGGLKFGLKQNDIHSNDKYALAKMGLGNLLGNAKESESRQSITRSVISEGDWQIASAQGRKNIAGIEKGTSSAHKALAKADREGLLKEVELNRDVAKEFINETLIGGIADEAYRSQFIAEHRLMTFKMDENGEPIEDKQLEEDINKQFDNSVKLKKEFASFKDYWEAYKAIGGNIYELREVSDQERKNLKTARYTDPETGKTVEKIVVGVNGIFNNIQAAAKFAAQQYVGRFNPEKNRYERTYENVYFLHNPETNGRGFSKLPEIAVAAFHKMLEGAKIGNKTVIGLSNSGLALGNIMEDYGKDKNGLFVGSHSRGTLVVDNVLNTLNTQANRDKKILSNTELKMVGPAANVVRADKRLFQLQQGVTTPRTADFARQSIQIENHELDLIGMLIGRNPATVGTNTRQKSQWQAIRDIIGDYTSPHNCYGMANKQCVTDGYRDPENKQTQSPTGVFERGVSNEIEIMYRPVRIYDLQHPKGKTK

SEQ ID NO: 1771 - protein, 52 aa, Neisseria
MDQQPLLKLPNSHIIIWRMDGLGKIFSQLKNNDNLFIEAYLRPVNFHSNSFE

SEQ ID NO: 1772 - protein, 327 aa, Neisseria
MSEIKTDDPKRGIKLRGADKTARIPIKVVPLQEKLKKPEWIRAKLPSRKFFEIKDILREQKMHTVCEEASCPNIGECFSKGTATFMIMGDICTRRCPFCDVGHGRPNMLDPDEPRNLAESVKAMNLRYVVITSVDRDDLRDGGAQHFADCIKAIRETSPNTKIEILVPDFRGRLDIALKILAETPPDVMNHNLETHPSLYRKARPGANYQHSLDLLKRYKEMMPHIPTKSGIMVGLGETDEDVREIMRDMRAHNIEMITIGQYLQPSDGHLPVLRYVTPEQFKIFEKEAYELGFSNAAIGAMVRSSYHADEQAAEALRESHGGCGHH

SEQ ID NO: 1773 - protein, 207 aa, Neisseria
MKIIHKGLVEYLPTFEAMKTFNAGRNADTEDELWVVEHPPVFTQGLAGKPEHLLIRDDIPVVQIDRGGQITYHGPGQLVVYTMIDFKRRKTSVRNIVSALENSIIATLAEYGIEAAADPKRPGVYVGERKIASLGLRIKNGSVYHGLALNVNMDLSPFTHINPCGYAGMEMTQIADFVQPCPTPDEVAAKLTAHLETQFTPKADNNE

SEQ ID NO: 1774 - protein, 91 aa, Neisseria
MTEQKNKTSLIEFPCTFPLKVMGAVHPEFEQAVLDTVRLHAPDTQAHHITTRPSSKGNYTGATVQVKVENQEQLDNIYRALTSHELVKVVL

SEQ ID NO: 1775 - protein, 356 aa, Neisseria; identical to SEQ ID NO: 392

SEQ ID NO: 1776 - protein, 315 aa, Neisseria
MEFFIILLVAVAVFGFKSFVVIPQQEVHVVERLGRFHRALTAGLNILIPFIDRVAYRHSLKEIPLDVPSQVCITRDNTQLTVDGIIYFQVTDPKLASYGSSNYIMAITQLAQTTLRSVIGRMELDKTFEERDEINSTVVAALDEAAGAWGVKVLRYEIKDLVPPQEILRSMQAQITAEREKRARIAESEGRKIEQINLASGQREAEIQQSEGEAQAAVNASNAEKIARINRAKGEAESLRLVAEANAEAIRQIAAALQTQGGADAVNLKIAEQYVAAFNNLAKESNTLIMPANVADIGSLISAGMKIIDSSKTAK

SEQ ID NO: 1777 - protein, 135 aa, Neisseria
MTVWFVAAVAVLIIELLTGTVYLLVVSAALAGSGIAYGLTGSTPAAVLTAALLSALGIWFVHAKTAVRKVETDSYQDLDAGQYVEILRHTGGNRYEVFYRGTHWQAQNTGQEELEPGTRALIVRKEGNLLIITHP

SEQ ID NO: 1778 - protein, 219 aa, Neisseria
MDTWHDALGGEKQQPYFQEILNAVRQERLSGQIIYPPAADVFNAFRLTAFDRVKAVILGQDPYHGAGQAHGLAFSVRQGIRIPPSLLNIYKELETDIEGFSIPAHGCLTAWAEQGVLLLNTVLTVRAGQAHSHALLGWERFTDTVIRQLATHRKHLVFMLWGGYAQQKGRLIDSQNHLILTAPHPSPLSAYRGFFGCRHFSQANSYLSRHGIDPINWKL

SEQ ID NO: 1779 - protein, 133 aa, Neisseria
MMKKQRHILCVGCLYIILKVNVFPNTGWMEASKGMQGMSFSTFGYADAPGYTFSRIGHTLIFLLGKTTGTRTTVSDSSHNVYYVKLYICANNSKALSCCLMLCQFGRKLSICAIKRALRWRSSKWVSSWTTTY

SEQ ID NO: 1780 - protein, 171 aa, Neisseria
MKSKLLLILINFSLISSPLGANAAKIYTCTINGETVYTTKPSKSCHSTDLPPIGNYSSERYIPPQTPEPVSSPSNGGQVVKYKAPVKTVSKPAKSNTPPPQQAPSNNSRRSILETELSNERKALVEAQKMLSQARLAKGGNINHQEINALQSNVLDRQQNIQALQRELGRM

SEQ ID NO: 1781 - protein, 640 aa, Neisseria
MIEIKNLTLQRGLKVLLDKANATVNPGQRVGLIGKNGTGKSSLFALIKGEITQDGGDVSIPKNWRLASVSQETPDLDISALDYVLQGDAELQAFQTALRQAEAQNDGMKQAEYHAKLEEIDAYTAPARAAKLLNGLGFSQEEHSRPVKSFSGGWRMRLNLAQALICRADLLLLDEPTNHLDLETVLWLENHLASLPCTQIIISHDRDFLNAETTQTIELSQQKLTQYGGNYDFYQNERAQRLAQQQAAYVKQQAQIKHLQSFIDRFKAKATKAVQAQSRMKALAKLERIAPAHLDSEFSFEFYHPDHLPNPLLKLEHADLGYEGKTVLHDITLSLESGARYGLLGVNGSGKSTFIKALAGTIDLLSGSIVRSEKLNIGYFAQHQLDTIRSDQNPVWHIQQLSPEVREQEIRNFLGGFNFVGDMALQKTEPFSGGEKARLALAMIIWQKPNLLLLDEPTNHLDLDMRHALTLALQSFQGALIVVSHDRSLLEATTDSFLLIDKGRLKNFDGDLNDYRQWRLAQENAAVAPAASAQSQSRKDTKRIEAQIRQEKARRGKPIQQKIDRAEKEMAQLSEIQTACEAFLAQEEAYFEENKEKLQDTLSELAKVKTQLAQIEEVWLACQEELEQIETEIEKQFAER

SEQ ID NO: 1782 - protein, 131 aa, Neisseria
MMRQRGKKMLFEENPIDGQFAEYECGAGGIRLAGQSFHKPVLVHKDSVCLSQCRTLSDLTPENLLSDVKPVDYPEILIIGTGAAQEFIHPKIMADFSRIGISVECMNTDSAFRTLVFLHSEGRRAWAWLQP

SEQ ID NO: 1783 - protein, 435 aa, Neisseria
MKPVNIGLLGLGTVGGGTAAVLRDNAEEISRRLGREIRISAVCDLSEEKARQTCPSAAFVKDPFELVAREDVDVVVELFGGTGIAKDAVLKAIENGKHIVTANKKLLAEYGNEIFPLAEKQNVIVQFEAAVAGGIPIIKALREGLAANRIKSIAGIINGTSNFILSEMREKGSAFADVLKEAQALGYAEADPTFDIEGNDAGHKITIMSALAFGTPMNFSACYLEGISKLDSRDIKYAEELGYRIKLLGITRKTGKGIELRVHPTLIPESRLLANVNGVMNAVRVNADMVGETLYYGAGAGALPTASAVVADIIDIARLVEADTAHRVPHLAFQPAQVQAQTILPMDEITSSYYLRVQAKDEPGTLGQIAALLAQENVSIEALIQKGVIDQTTAEIVILTHSTVEKHIKSAIAAIEALDCVEKPITMIRMESLHD

SEQ ID NO: 1784 - protein, 144 aa, Neisseria
MTEPKHEMLTKEQVAARKKAKAKIRTIRIWAWVILALLALTALLSQCAMSKPQAKQKIVESCVKNIPFAEKWQNDLRARGLDSNNTRLAVDYCKCMWEQPLDRLSEKQIRSFGKLGAQEQLDLLGGANAFEARDKQCVADLKSE

SEQ ID NO: 1785 - protein, 89 aa, Neisseria
MNKSELIEAIAQEADISKAAAQKALDATTNAVTTALKQGDTVTLVGFGTFYVGERAERQGRNPKTGEPLTIAAAKTPKFRAGKALKDAL

SEQ ID NO: 1786 - protein, 820 aa, Neisseria
MTQKEKHFEEYAALATLPLRDVVVYPHMVLPLFVGRPKSIAALENAITREEPVFLLAQTDAAVEEPIAADLYQTGTVAQVLQVLKLPDGTVKVLVEGLYRGRVLTIEDTGGLFVSHIETVVEEDTGGNTDLEAVRRTLLAQFEQYAKLNKKIPAEIIGSINGIAENSRLTDTVAAHLQLKLAQRQQILEIPEIGKRMEFLLAQLESELDIMQAEKRIRGRVKRQMEKSQREYYLNEQIKAIHKELGEEDENGELDALEADIKKAGMTKEAEEKCLSELKKLKMMPPMSAESTVVRNYIDTLLELPWKKKSRVSKDIAKAGLVLDADHYGLEKVKERILEYLAVQKRMDKLKGPILCLVGPPGVGKTSLGESIAKATGRKYVRMALGGVRDESEIRGHRRTYIGSMPGKILQNMAKAGVKNPLFLLDEIDKLGNDFRGDPASALLEVLDPEQNNKFADHYAEVDYDLSDVMFIATSNSLNIPTPLLDRMEIIRLSGYTEDEKINIAMQYLVPKQMKRNGVKEGELAIEESAVRDIIRYYTREAGVRSLDREIAKICRKVVMQITLDEDKKRLSETKKTSKAKPKAVKVNEKNLHDYLGVRRFDYGVAESENRIGQVTGLAWTEVGGELLTVEAAALPGKGVIQCTGQLGDVMKESVSAAWSVVRSRAESVGLAPDFYEKKDIHIHVPEGATPKDGPSAGIAMTLAAVSAFTKIPVRADVAMTGEITLRGEVLPIGGLKEKLLAALRGGIKHVLIPKDNVKDLEEIPENVKTGLTIHPVKWIDEVLALGLESQPEPWAEPSGAEAAAESASKPKPRSRATKH

SEQ ID NO: 1787 - protein, 306 aa, Neisseria
MKKRVRKPAAVRSDADIAALFHAHRMKQAQQSRILNMLAVEIRPGFVLDNKRAPDIRSALLDVYGEADGKPFFLPLNLLLGFMGAHEWHKKGVAVPQLGGSIHVPFGVFSPLRGEYLDLLAHAPSTGFQTAFDIGTGSGVLAAILAKQGIPSVIGTDTNPKAVACARANIARLGFEKQVEIRETDLFPEGFADLIVCNPPWLPAKPTSAVESALYDPESAMLAAFLRDAPKHLNPDGEIRLIISDLAEHLHLRPSDFLDKAFAQAGLRVADMMKTKPKHKKAANPSDPLAFARTRETTFLYRLKKA

SEQ ID NO: 1788 - protein, 581 aa, Neisseria
MERQTDEFAQAAARAAIRFLEHYAGSGDEVLANCTERLFQALQNGHSFIRLSGGEADALSALAPVVGTSAAPLILEGRRLFLGRMWQLEYDLAAEIKRLAAAGTSAPDAAGARQNLAKWFQGTGSEGQRDAAALALLQSFMVITGGPGTGKTTTVAKLLALICGEDENLPNIALAAPTGKAAAHMARALHRAINGFDAPEAVRRHLLKLEGQTVHRLLKLRPPKMQAAFNPVYPLPFDVLVIDEASMLDTALMLQLLKAVKTGARVILLGDENQLPSVGIGAVLSVLSQKTVLDGETHQRLAGFLPEHGFSVSANPPVLAQNTAHLSFSHRFGDNSGIGCLARAAVSGDEGAWALFDRFPDELEHSECSPNARVERLYRAHKAYWQAVKDGNIEAAYAGISDIVVLAAWRQDAEDFNEAYCRHVRRKMNIPEHLAYFAGEPIMIRQNDYALELFNGDIGLIMEDVGRQGSLAAYFADADGFKKVAVSCLPEFEPAFAMTVHKSQGSEYREVWLLPPSAAPSDEGDDALSGLSKELLYTAITRAREKFVFFGGEEAFRQAAATVKTRQTALGSMLERVFSQE

SEQ ID NO: 1789 - protein, 231 aa, Neisseria
MSELILKCEGVGKRYRDGGLDVRVLHGLDLEIHAGESTGIIGSSGSGKSTLLHILGGLDMPSEGRVLLMGEDLRTLNQRRLGDLRNRHLGFVYQFHHLLPEFSALENVMMPLLIGKKSREEAAEAAMAMLEKVGLKHRSTHRAGELSGGERQRAAIARALVTQPKCLLADEPTGNLDRANARNVLDMMLELKTELGTGLVVVTHDDELAGRFERVMVMKDGSLHPKQGANA

SEQ ID NO: 1790 - protein, 415 aa, Neisseria
MFSLEAWIGLRYLRAKKRNGFMSFITMVSIAGIALGVTALIVVLSVMNGFQKEIRGQLLNVAPHAEIGYIDNTDTDWRNLLRFTENRKGILAAAPYVSNQALLANAGEIRGVQMRGILPSEERKVVEYGDKMPAGKFEDLIPGEFDIILGVGLAEALGAEVGNKVTVITPEGNVTPAGVVPRLKQFTVVGLVKTGVYEVDNSLAMTHIQDARVLYRLDKEVAGLRLKLADPQNAPALTATLIPEAQRDAVWVRDWTYSNRSYFEAVELEKRMMFIILTLIIAVAAFNLVSSLVMAVTEKQADIAILRTLGLSPAGVMKIFMVQGAFSGFFGTLAGVVCGVLLGWNVGRVVAFFENLLGVHLINSQVYFIDYLPSDVDMGDVALIACISLGLSFVATLYPSRRASKTQPAEALRYE

SEQ ID NO: 1791 - protein, 92 aa, Neisseria
MNIRTAFALCAIALSAAAAAYAKEIKIDANNTPYSEADAQKLAATAVGMGVKEPISLNGGSGSITVSGSSATQCVFKVGNGGALQIQGLNCK

SEQ ID NO: 1792 - protein, 206 aa, Neisseria
MMSHKKQDAFQGLIDALKVLPNVGPKSAQRIAYHLLQHKRKEAEKLVDALQTALKQVYHCAMCNTFCEGGLCDICADETRDGRRLMVVHMPADVSNMEAANCHDGLYFVLMGQINTALGMDVSAIALDRLAQRLGGGEVEEIIIATAFTAEGNATAYVLSEFFKNLPYKVSRLSQGIPLGGELEYVDAGTLAQAVYERRLIKEGGA

SEQ ID NO: 1793 - protein, 512 aa, Neisseria
MFHSIEKYRTPAQVLLGLIALTFVGFGVSTVSHPGADYIVQVGDEKISDHSINNAIQNEQADGGGPSRDAVFQSLLQRAYLKQGAKLMGISVSSEQIKQIIVDDPNFHDANGKFDHALLNRYLSQRHMSEDQFVEEIRDQFALQNLVNLVQNGVLVGDAQAEQLIRLTQVNRTIRSHTFNPDEFIAQVKVSEADLQKFYNANKKDYLLPQAVKLEYVALNLKDFADKQTVSETEVKNAFEERVARLPANEAKPSFEQEKAAVENELKMKKAVADFNKAKEKLGDDAFNHPSSLAEAAKNSGLKVETQETWLSRQDAQMSGMPENLINAVFSDDVLKKKHNSEVLTINSETAWVVRAKEVREEKTLPFAEAKDAVRQAYIRTEAAKLAENKAKDVLTQLNGGKAVDVKWSEVSVLGAQQARQSMPPEAYAELLKAKPANGKPAYVRLIGLPAPVIVEVQAVTPPDDIAAQLPLAKQALAQQQSANTFDLLIRYFNGKIKQTKGAQSVDNGDGQ

SEQ ID NO: 1794 - protein, 124 aa, Neisseria
MIVLHGIPNCDTVKKAKNRLAGYGLEFEFRDFKKQRPSEAEICSWLEQVPLATLLNKRGTSWRKLDAETQQKVLSSTAEAVKLMSEMPSLIKRPVLECGGKVYAGFSEETYDGIFNRQAPCRQG

SEQ ID NO: 1795 - protein, 542 aa, Neisseria
MISTNGITMQFGAKPLFENVSVKFGEGNRYGLIGANGSGKSTFMKILGGDLEQTAGEVAIENGVRLGKLRQDQFAYEDMRVLDVVMMGHTEMWAAMTERDAIYANPEATEDDYMKAAELEAKFAEYDGYTAEARAAELLSGVGISEDLHNAKMAEVAPGFKLRVLLAQALFSKPDVLLLDEPTNNLDINTIRWLEGVLNQYDSTMIIISHDRHFLNEVCTHMADLDYNTITIYPGNYDDYMLASAQSRERALKDNAKAKEKLQELQEFVARFSANKSKARQATSRLKQADKIKSEMVEVKPSTRQNPYIRFEADEKAKLHRQAVEVEKLAKRFETQLFKNLNFILEAGQRLAIIGPNGAGKSTLLKLLAGAYNPEYSDGLLPDEGTIKWAEKASVGYYPQDHENDFDVDMDLSEWMRQWGQEGDDEQVIRGTLGRLLFGSNDVVKKVKVLSGGEKGRMLYGKLLLLKPNVLVMDEPTNHMDMESIESLNMALEKYNGTLIFVSHDRQFVSSLATQIIELDGKGGYEHYLGDYESYLEKKGVA

SEQ ID NO: 1796 - protein, 417 aa, Neisseria
MQTYLVGGAVRDYLLGLPVKDRDWVVVGADAQTMLAQGFQPVGKDFPVFLHPETHEEYALARTERKTAKGYVGFSFHADKDVTLEQDLMRRDLTINAMAQDADGKIIDPFGGQRDLAAGILRHVSPAFAEDPVRILRTARFAARYKFEIAEETIKLMRQMVENGEADALVAERVWQEFAKGLMEKNPRKMIEVLRECGALKVLLPEVNALFGVPQRADYHPEIDSGIHTLMTLQRAADMGLSLPERYAALLHDLGKAKTPSDILPRHHGHDLAGVEPVREVNQRLRAPKHCAELAELVCRWHIIFHQVGQLKSQTILNVLKKTDAFRRPERFQTALNVCIADTQGRLNREHTPYPQRAHWLALLEAANQADSGKIAAECRAQGKAHLIAEQIDRARLAQIAPLQKAFRAAQDKTEKH

SEQ ID NO: 1797 - protein, 102 aa, Neisseria
MTLKTDLLPKINNEDYQRLILKHSAEFSGGEIRLLNEILEKFNFDVVQAQALAQAVMQQIRFDPNAYHIDSDDEDTTGICPHCINPPMPPLRDYLVWRETRG

SEQ ID NO: 1798 - protein, 343 aa, Neisseria
MLQTDNLTAAQPQRIVAAQTASAQEELLERALRPKTLDDYIGQDKAKEQLAIFIQAAKKRGEALDHVLLFGPPGLGKTTLAHIIAKELGVNLRQTSGPVLERAGDLAALLTNLDPHDVLFIDEIHRLSPVVEEILYPALEDYRLDIMIGEGPAARSVKIDLPPFTLIGATTRAGMLTNPLRDRFGIVSRLEFYENRDLTTIVSRSAQLLQLDMSEEGAEEIAKRSRGTPRIANRLLRRVRDFADVKNNGTIDGGIADAALSMLDVDAQGLDVMDRKFLEAVLHKFGGGPVGLDNVAAAIGESTDTIEDVIEPYLIQQGFLQRTPRGRMATERAYLHFGLPVEK

SEQ ID NO: 1799 - protein, 242 aa, Neisseria
MTTYRIAPSILSADFARLGEEVESVIAAGADLIHFDVMDNHYVPNLTFGPMVCAALKPYASVPIDVHLMVEPVDDLIQSFAKAGASIITFHPEASRHIDRSLSLIRDMGCQAGLVLNPATPVYLLENVLDRLDMVLLMSVNPGFGGQSFIPHTLEKIRRVRAMLDRYEAQSGRHIAIEVDGGIKTDNIAAVARAGADTFVAGSAIFGKPDYKAVIDAMRAELEKSGRLNLAPMIEIEMPSEN

SEQ ID NO: 1800 - protein, 399 aa, Neisseria
MEEPVLDFQFVHRKIHTGQIAAFDIIARLVPIKNIRGNDFDDRPAAAVFGMHNLQTRPVARHFEGGADFTQLIVLTLGQPESAYVAVRLKIVRGDISRGGVGKLTGKQSHTVMELNEFLDKAYAVLRRLDAVLPPEPGHTDWNALAFRWQSAGKKGFLEHLPDPHTFPLVRLAGVGRQTELLVRNTEQFIVGRPANNVLMSGARGTGKSSLVKALLHEYADKGLRLIEVDKSDLIGLPYLLTLLKECPEKFIVFCDDLSFESGDETYKALKTALDGGLSQRCANVLVYATSNRRHLMPEYFDENAGTTGMRGEIHQKEAVEEKISLSDRFGLWLSFYPFDQNDYLAAVQNWLEDFGVPYDETAQMAALQWAQTRGSRSGRSAWQFACDWAGRLPKQRAL

SEQ ID NO: 1801 - protein, 234 aa, Neisseria
MLSEGISDGIFRGEMLQFAPFLPTQGNRIMFTGIVQGLGKLTAIHRPSEAFHTYVVELPQEAADNLQRGASVANNGCCLTITEIEGNRVSFDLMAETLAKTNLGLLKEGDCVNIERAARFGDEIGGHVMSGHIMATVPIVEIERDGFNRTVWFSLPHELKPYILTKGFVGLDGCSLTIGKVEDGRFNVHLIPETLERTLFGSRKVGDRINIEIDPNTQAIVDTVERLMAQRYAK

SEQ ID NO: 1802 - protein, 590 aa, Neisseria
MILPARFSDGISLSLRLKLLTGLWVGLAALSVVLTLLLSLRLENAASVIEEAGNLRMQAYRLAYMAGEGSPRAQIDNQVAEFEKSLKRIAQSDAIHPLIPSDTPLAYDLIQSMLIIDWQAHILPPLQSYRRPTQVDLYRFAGNIELFLQALENANEKNTWWLRRFQWAIMLMTLVSSVLMLFWHQIWVIRPLQALREGAERIGRRCFDIPVPEGGTPEFKQVGRCFNQMGGRLKILYDDLEGQVAEQTRSLEKQNQNLTLLYQTTRDLHQSYIPQQAAEHFLNRILPAVGADSGRVCLDGGSDVYVSIHHADCGTAASDLGKYHEEIFPIEYQNETLGRLLLSFPNGISLDEDDRILLQTLGRQLGVSLAGAKQEEEKRLLAVLQERNLIAQGLHDSIAQALTFLNLQVQMLETAFAENKREEAAENISFIKTGVQECYEDVRELLLNFRTKISNKEFPEAVADLFARFTQQTGITVETAWENGSFLPPQEAQLQMIFILQESLSNIRKHARATHVKFTLSEHGGRFTMTIQDNGQGFDTEKIGEPTGSHVGLHIMQERAKRIHAVLEIRSQAQQGTTVSLTVASEESLK

SEQ ID NO: 1803 - protein, 218 aa, Neisseria
MTIKIILIDDHTLFRSGIKALLSRQHGFEVIGEAADGLSGIKMISRLQPDVVLLDLDMPGMNGREALSQIISINPQQAVIMLTVSEDSDDLTECMRIGARGYLLKNINADFLLESIRKAAEGDNVFSPEMTAKLVKSLISPQPAQGTQALSSLTPRELEILGYLAAGHSNKIIARHLDLAESTVKVHVQNLLRKLNLSSRVQAAVYAIRHNVPQPVPE

SEQ ID NO: 1804 - protein, 321 aa, Neisseria
MSYTQLTQGERYHIQYLSRHCTVTEIAKQLNRHKSTISREIRRHRTQGQQYSAEKAQRQSRTIKQRKRQPYKLDSQLIQHIDPFIRRKLSPEQVCAYLCKHHQITLHHSTIYRYLRQDKSNGSTLWQHLRICSKPYRKRYGSTWTRGKVPNRVGIENRPAIVDQKSRIGDWEADTIVGKGQKSALLTLVERVTRYTIICKLDSLKAEDTARAAVRALKAHKDRVHTITMDNGKEFYQHTKITKALKAETYFCRPYHSWEKGLNENTNGLIRQYFPKQTDFRNISDREIRRVQDELNHRPRKTLGYETPSVLFLNLFQPLIH

SEQ ID NO: 1805 - protein, 344 aa, Neisseria
MSTSLSYRDAGVDIDAGDQLVENIKPFAKRTMRPEVLGDLGGFGALVEIGKKYQNPVLVSGTDGVGTKLKLAFDWDKHDTVGIDLVAMSVNDILVQGAEPLFFLDYFACGKLDVPRATDVIKGIAQGCEESGCALIGGETAEMPGMYPVGEYDLAGFAVGVVEKENVITGRSIGVGDVVLGLASNGAHSNGYSLIRKIIERDNPDLDAEFDNGKTLREAVIAPTRLYVKPILAALEKFTIKGMAHITGGGITENVPRVLPENTVAQIDAKSWELPKLFQWLQKAGNVETQEMYRTFNCGIGMVVIVAAEDADAVQGLLGEQGETVYRLGLIRERQGDEHQTQVA

SEQ ID NO: 1806 - protein, 225 aa, Neisseria
MPAALIKDFLLTQGLKLPLDEVRAAYLTAQTVMDMGTASIDRSVLWRSDEGWKLADYLSCDNVREDALKRLFMALDSVFSRSTGVRSAAVYALMPSENQAFQLICLSRQGEVLENLWDLDEAAGKVSLACRSAQSGWMNVASDVRRWLDLGELSGERNHASAAQISIPVCTESGGVLGVVHVEFECAECAGTAAQVEWVALALALSEPLKLLLGMSAGKDGSEDV

SEQ ID NO: 1807 - protein, 197 aa, Neisseria
MSEMLNHVASCRLPTEWGVFTMHGFEEANGQEHVALTVGNFSDGNPVLTRIHSECLTGDALFSRKCDCGPQLEAAMRAVQTEGRGIIVYLRQEGRGIGLINKIRAYHLQDQGMDTVEANLALGLPVDARDFRLAQSIYEYLGIRSVKLLTNNPEKIQTLKDAGINVVERIPLHVGENLENKRYLQTKADKLGHLMSE

SEQ ID NO: 1808 - protein, 363 aa, Neisseria
MSHISPIPEILADIKAGKMVIITDAEDRENEGDLLMAAQFVTPEAINFMIKHARGLVCLPMDGEMVEKLGLPMMTQKNGAQYGTNFTVSIEAAHGITTGISAADRALTIQTAVSPTAKPEDIVQPGHIFPLRAQKGGVLVRAGHTEAGVDLAQMNGLIPASVICEIINDDGTMARMPELMKFAEEHKLKIGTIADLIEYRSRTESLLEDMGNAPVQTPWGEFQQHVYVDKLSGETHLALVKGTPAADTETLVRVHEPFSVMDFIQANPRHSWSLPKALEHIQQAESGVVILLHRTEDGASLLDRTLPKGANQAYKWDSKSYGIGAQILAGLNVKKLRVLGQPSSFTGLTGFGLEVVGFEEAEK

SEQ ID NO: 1809 - protein, 76 aa, Neisseria
MEDFSVVIGYDEIKAKNHSLSAGQYFEVKIDYVDISADEFAQKMAGFSADLDKLFAESAELEKEIKDRLAMLKFNS

SEQ ID NO: 1810 - protein, 436 aa, Neisseria
MTDLFAREPDAPLAERLRPHTLDDVVGQEHLIGEGKPLRVAVEGGKPHSMLLWGPPGVGKTTLARILAQSFNAQFLPVSAVFSGVKDIREAIDKAEIALQQGRATILFVDEVHRFNKAQQDAFLPHVESGLLTFIGATTENPSFEVNPALLSRAQVYVLQPLSSDDLKKLIAKVLALPEYQEFTIETDAQKLLVNTADGDARRLLNLLEQLLRAADTRRLKNLTAEFLADSLGAQIRRFDKGGESFYNQISALHKSVRGSHPNAALYWFCRMLDGGTDPRYLARRIVRIAWEDIGLADPRAFQIANDAAATFERLGSPEGELALAQAVLYLAAAAKSNAGYKAYNQMRHFVKENASDEVPVHLRNAPTKLMKELGYGREYRYAHDEPNAYSAGESYMPDGLDEPDFYQPVPRGLEIKIGEKLEWLKSLDEEVLKAK

SEQ ID NO: 1811 - protein, 321 aa, Neisseria; identical to SEQ ID NO: 1804

SEQ ID NO: 1812 - protein, 979 aa, Neisseria
MSGFNYEKNQPHQMRAVSAVLGVFDGATPKYRTADENPELLFAAKQYANNILKVQSQNGIDGRFPDRSDDQNILDISMETGTGKTYTYTQTMFELHRWLGVFKFIVVVPTLSIKAGTQQFLQSKALAEHFEQDFGGDYEGVRLKTYVVESAKKNKGKKSNAPITIEQFVKAENKKEIHVLLINAGMVNSSSMNDTGDKALKDLFDNPVDALAAVRPFMIVDEPHKFPTRDSAKTWGNIKRLKPQYILRYGATFNDEYYNLLYRLTAVDAFNDGLVKGVRVFQEEMQGGMDAAVKLVSSDGKEAKFELNEKDKKQTFKLAKGEDLAQIHPAISDLKIDKMNKTVVVLSNGLELKTGAVINPYSYSQTVQDAMMQRAVAEHFKLERALLAERAPQPKIKPLTLFFIDDIAGYRSGNELSGSLKDKFESWIRAEAARRLKTESDPFYRDYLQKTLDDVSACHGGYFSKDNTDSDDRIEQEINEILHDKEKLLSLDNPRRFIFSKWTLREGWDNPNVFQICKLRSSGSTTSKLQEVGRGLRLPVNELMARVRDVPYKLNYFVDSSEKDFVKQLVGEINDNSFQEEISKKFTEELKQKILQKYPDIKPLVLVNQLFLDGIIDDNENFAEDGYDKLKAAYPEAFPKGLDKGKVSNAKDEGKDTIIMREGKYEELKALWELIHHKAVLQYKIKDEAEFADLFTAYLHENAAKFPQAGIRTAVNEAYINNGLMLSRRIDSFEDEDFIRFNTMTYREFLEKLAQTAKIRMQTLHQAFYCIRNELNIGDFLNMQTIAQIKNGFNRFLLHHSFHKFELDYRLVGSKIHPTKFTNKDGKPRAVKKADLGRFEDTEHRPAAGYLFGEIFYDSDIEHENVANNQIEGVIVFTKIPRNSIKIPVAGGGTYSPDFAYIVKTKSGEILNFVIEAKGTDGAEDLRKSEERKIKHAEKLFAEISKEIKVVFKTQFDGERIAELIGQNMPAGGHSENGR

SEQ ID NO: 1813 - protein, 185 aa, Neisseria
MKPKFKTVLTALLLAVSLPSMAATHVLMETDMGNIRLVLDESKAPKTVANFVRYARKGFYDDTVFHRVIDGFVIQGGGLTEDLAQKASDKAVANESGNGLKNTAGTIAMARTTAPDSATSQFFINLADNASLDYKNGQYGYTVFGRVESGMNTVSKIARVKTATRGFYQNVPVQPVKIRRVVVGQ

SEQ ID NO: 1814 - protein, 305 aa, Neisseria
MKKTKVHLISGFLGTGKTTALKSLMAQKDPNEKWVIIVNEFGEIGIDGAVLSDNGIPVAEIAGGCLCCTAGPQMGVTVQKMLRDAKPDRLMIEASGLAHAASVIDELKTKPLDSLLEIGAVFTVVDPRQFINPDYAQQALYKDQIGICDVLVASKTDLCTPEQLAEFHDKAAKLFPPKAKVVEVQNAQLDIQWLDIPVIEKSRYRLKALPDNTMGFQSQGFTFPAGRDFDGEKLTNFFNDLPNMTEGLVRAKGVFQVLGTWVWLNWVDGQWGANQVSWRRDSRFELIAKSFDADLIEQKLKDALE

SEQ ID NO: 1815 - protein, 90 aa, Neisseria
MKMQKELSVYLKQILQAAQYIRLYTDKMDYGQFSADTKTVQAVVFNLFLIGENATHILKSYPEFAEETKYLNWIGMRGYCAIGLPMATLK

SEQ ID NO: 1816 - protein, 97 aa, Neisseria
MKPSLLLQSRKKEILAVFGKYPLICNPRVFGSVSRGDDTENSDIDLLVDAKTGTTLLDLGGLQEELQKLLGIKVDLLTPDDISAHFRDKVLTEAVAL

SEQ ID NO: 1817 - protein, 158 aa, Neisseria
MKTNFKQKIIEQARSEGLQVTALREQVLDIVLQQSGVIKAYNVLSQMQQQSEGVLAPPTAYRALDFWAEQGVLHKVAAVNGYILCSHAQHECDDHCHDHEEAEAHHSAFILVCTECGTADEQTLSHEWAALRAGVAESGFALKEEHVVLTGICKKCQQ

SEQ ID NO: 1818 - protein, 151 aa, Neisseria
MKKPKILFVCLGNICRSPMAEYILRRRAAEAGIPLEADSAGTSGWHDGEDMHRETAKILKKHGIDASGFTSRKIRQSDAAAFDCIIAMDGKNLSELERTFGRRPEKIFKLTDLIPESGYDHVPDPWYTGDFEETFRLADAGCRALLEKISK

SEQ ID NO: 1819 - protein, 371 aa, Neisseria
MKIVIAPDSFKESLTAQQVAEAIKRGFQQSIADVECLLCPVGDGGEGTVDAIRHSLDLEEKCLQVTGPFGQKEVMRYFQKEQLALFEVADLVGLGKIPLEKRNPLQIQTRGIGELIRHLISQEIKEIYIGVGGTASNDGGIGIAAGLGYQFYDEDGNALPVCGQSLLNLASVSTENRYEIPEDVHIRILADVVSPLCGHQGATYTFGKQKGLDSTMFEAVDQAIQDFYEKVSPATLKLKGAGAGGGIAGGLCAFAQASIVSGIDTCLDLIDFDKKVSDVDLVIVGEGRLDRQSLAGKAPIGVAKRTPVGVPVVAICGSLVEDLPSLPFENIQAAFSILEKSEPLEDSLKNASLYLEHTASNIGHLLNMPKI

SEQ ID NO: 1820 - protein, 365 aa, Neisseria
MNQTFTLPDTRPYPQNPIKNHLLLNAYQLAHNSSQASRKLSSGQLQTEIRGMLEQNHYINLSLALTMSPDAGTYAALLSSVNAVLDCEKEGEVQWFALPVVLVSGCKKERAIEMKLPTEALFACLQNYPHLRALTQETQWLPYLVHSSDLSAVAPDEWWRAKQNTEAAAQHLRRFAPRPLLLPEGQSVHVVYALGFGSGKVQTALGQNLLQAGLPLMQVWQENLASEGVTLFANPLSPDSPVRALSDGSHTRQRMAMDVFAANAIRAVRMQSPRVGVVAAAKAGGQILFGFNATDGAFEVVPQVFSWQLSFTDNIAVIQQNFLDLMAECRVEHVYLLHNPLGEQESIPSYAEALKREGHNPFFSA

SEQ ID NO: 1821 - protein, 543 aa, Neisseria
MNWLNLRAIVPSDKQNMPNKKKKAAFARAATENGVPDVSNIKNSYDDLMYESGAFSQTAINNLEARARLMGLQPAPAANAKVLELGCSMGGNIITQALYYPDAEFVGIDLSGRQVAQGNAIIEKMGLKNVRLEEKDILTIDESFGKFDYIIVHGIWSWVPDAVKDKIFSICWNNLTKHGIAYISYNVYPGWKRQEQLREIMYFAGRDVLEEPLEARTRKGLDALKALAEILENDKGLDGGGKLPAIQKILNHNFYYIAHEYMEAFNDPIYVNGFIEWANRHRLAYIGDTNLHVSFVSWMAEHTRERILALAGDDYIAKEFYSDILSDRQFRRSLLCREEVGDTVRRDESVAVEVIESLNFRPARGETINFDENDILLSGIRDVMKTGEAFKTEDVAENLARRFPGLEFDRMKINSQLLLQTILGRFSVSSDNAGKPFFEDHKTYVPARFTNYAAAFVEHGAEAFVRPANRYNESTPSFGYGHLYIMRQLSRPTSKQALIETVAENLNIVSTTPDGLTFHPPAEVYVEEILADLADRHFLVSAD

SEQ ID NO: 1822 - protein, 70 aa, Neisseria
METLILDIGGMSCGGCVKSVTRILEGVKGVASVEVSLENKSATVGYDPAQTDAGALIEAVEDGGYDAALK

SEQ ID NO: 1823 - protein, 47 aa, Neisseria
MMLNQGFCEAFIVVVLMGIAAIMRKRPYFFKPPHRFRVCPSSRPDLQ

SEQ ID NO: 1824 - protein, 806 aa, Neisseria
MPLLSVEFALFFLAFLPIYWGLAKYPSVQNLLLLAAGMGWLYHIGPVFAAIIVLYSSCVYLLGELLRSDRENTRRFWLGCGIAASLTVLGFFKYFDFFRPMIAQYAGKGGAIDILMPLGLSYYTFQSLAYLVYCFRAPHAARFSWHELLLHLSFFPTVTSGPIIRAAAFKSADGEQAGALAQIRTRRARSPVRPALAVSLILLGIAKKWWLAGMLAENWVSPVFENPAQFDGWGVLGGVYGYTFQLFLDFSGYSDLVIGMAMLLGFRLPKNFSAPLRALNIRAFWDKWHISLSTWIRDYIYIPLGGSKKGFLRTQLNLMAAMVLSGIWHGYGWNFLIWGALHGTALVLLNTGDRYFGRDALCRLKYFAPLSWLITFHFVCLSFVVFNTANPDDAGAVFSALFANANGWNAPQQANMLLLASFASVMLLYPYLQRAFDGAVKGLEKIPMWLWFIPVSAVLLLIIVLAPSGIPGFIYANFVMKNFLSLFSSILMSALIAVWFSQNPINAYWQQTYHRNSPLEPLAAYGWWRSGAALQENAYALSDGIKAFLSGETPPTAQDGGSADMPSEAAASEAVPQTGETEWKQDTEAAAVRSGDKVFFVGDSLMQGVAPFVQKSLKQQYGIESVNLSKQSTGLSYPSFFDWPKTIEETLQKHPEISVLAVFLGPNDPWDFPVGKLYLKFASDEWAQEYLKRVDRILEAAHTHRVQVVWLGIPYMKKAKLDGQMRYLDKLLSEHLKGKIILIPTTHTLSGGKDRYTDSVNVNGKPVRYRSKDGIHFTAEGQKLLAAKIMEKIVFEPSTQPSSTQP

SEQ ID NO: 1825 - protein, 517 aa, Neisseria
MNRTYANFYEMLAAACRKNGNGTAVFDGKEKTAYRALKQEAEAVAAYLQNIGVKFGDTVALAVSNSTEFITAYFAISAIGAVAVPMNTFLKNSEYAYILNDCKARFLFASAGLSKELAGLKAQTPVEKIIWTDKSRPTGETAEGDAFFEDVRRFPEKPDLGRQPRINDLAHIIYTSGTTGHPKGALISYANLFANLNGIERIFKISKRDRFIVFLPMFHSFTLTAMVLLPIYMACSIILVKSVFPFSNVLKQTLLKRATVFLGVPAIYTAMSKAKIPWYFRWFNRIRLFISGGAPLAEQTILDFKAKFPRAKLLEGYGLSEASPVVAVNTPERQKARSVGIPLPGLEAKAVDEELVEVPRGEVGELIVRGGSVMRGYLNMPAATDETIVNGWLKTGDFVTIDEDGFIFIVDRKKDLIISKGQNVYPREIEEEIYKLDAVEAAAVIGVKDRYADEEIVAFVQLKEGMDLGENEIRRHLRTVLANFKIPKQIHFKDGLPRNATGKVLKRVLKEQFDGNK

SEQ ID NO: 1826 - protein, 675 aa, Neisseria
MSLSEFIERRTSFNPMVILTTLFFVCVLVVLVLTVPDQVQMWLDRAKEVIFTEFSWFYVLTFSIFLGFLLILSVSSLGNIRLGRDEDVPEFGFLSWLAMLFAAGMGVGLMFFGVAEPLMHYFSDITAGTPEHRQQQALLHTVFHWGVHAWSVYGTIALALAYFGFRYKLPLALRSCFYPLLKEKISGRFGDAIDIMALLATFFGIITTLGFGASQLGAGLQEMGWIAENSFSVQVLIIAAVMSLAVVSAISGVGKGVKVLSELNLGLAFLLLFFVLAAGPTVYLLSAFGDNIGNYLGNLVRLSFKTYAYEREHKPWFESWTVLYWAWWCSWAPFVGLFIARISKGRTIREFVFGVLLIPGLFGVLWFTVFGNTAIWLNDGVAGGMLEKMTSSPETLLFKFFNYLPLPELTSIVSLLVISLFFVTSADSGIYVLNNITSRDKGLSAPRWQAVMWGVLMSAVAVLLMRSGGLGNLQSMTLIVSLPFALLMLIMCFSLWKGLSADKKYFETRVNPTSVFWTGGKWKERLVQIMSQTQEQDILKFLKQTASPAMHELQRELSEEYGLSVRVDKMFHRDEPAIEFVIRKETMRDFMYGIKSVGQDVSDQLINDGKLPHIRHQTTYKPYAYFFDGRVGYDVQYMNKDELIADILKNYERYLMLLDDVGQELMAHEQVELAE

SEQ ID NO: 1827 - protein, 668 aa, Neisseria
MADMKKITPQNLRPLLSESLGHTDFVNVLNALIKFLRRGGKKCAGERFDLIIDTFKQDRELLSRFSRCFYIWLAQIHIYPALIKLGIFSRHSFAREMGIRIYERFSPSYKDFANLGEVFLYLFHSENDDKWLQTLNIRQWLVLYELIRSHAEPSKLQTAGIRLADARLRAIEMLSVWTASEAIEPDLIRIAPRLLEADSSFVALQRETAKLVEHYRNGTTPYDTAHLEVMFDQCFSQIDYLRRKGTGAGSGSSVKVAHLLERLRQTVDRLKLLTDIQTGAGNSNRLTIALMNSLIYAAVEQYSTRHLRRSSIRMLARSITENKSHHGEHYITRNRKEYFKMFYSAAGGGIIIALMALLKIRIGSLGLSPFLTSLSAGFNYGIGFMIIHMLHCTVATKQPAMTAASFAEQVDLNEGGKAVDNKLAKLLIDVCRSQSVAVFGNVSIAILLACAISFGYAHLYRLPILDAHTAAYQFKSIDIIAYPTLWYAAIAGLWLFCSGIIAGFFDNRADYLNLRQRLPFNPLLRKIMRPGPRRVLAAYIHKHYGSLVGNFIFGMLLGMTGYFGHLLGLPLDIRHVAFSSANLGYAAVSGNVGLGTFVLGIFSVLAIGLVNLCVSFSLALFVALRSRGTKIGSIRNLIKSFWNQIKSNPCILFLPPAKEQGHPPSDKP

SEQ ID NO: 1828 - protein, 369 aa, Neisseria
MKKRKILPLAICLAALSACTAMEARPPRANEAQAPRAVEMKKESRPAFDAAAVFDAAAVPVSDSGFAANANVRRFVDDEVGKGDFSRAEWQDFFDKAAYKADIVKIMHRPSTSRPWYVFRTGNSGKAKFRGARRFYAENRALIDDVAQKYGVPAELIVAVIGIETNYGKNTGSFRVADALATLGFDYPRRAGFFQKELVELLKLAKEEGGDVFAFKGSYAGAMGMPQFMPSSYRKWAVDYDGDGHRDIWGNVGDVAASVANYMKQHGWRTGGKMLVSATLAPGADVQAIIGEKTALTRTVADLKAYGIIPGEELADDEKAVLFKLETAPGVFEYYLGLNNFYTVWQYNHSRMYVTAVRDIANSLGGPGL

SEQ ID NO: 1829 - protein, 475 aa, Neisseria
MIHTEPSAQPSTMDTAAFLKHIESAFRRIFSDGIDLMRYLPEDKWLALKQAGLLLPFLDKKYGGRKGSQFEIQEVLRIAGHYGVPVTLRTGIEGALVLQPLQEFGDEAQVAQGLEMIFKGEGGGLGVTEPETSGAAIAREMQSYYEYIDGQTIYVNAAKYWQGNSQSDFLLVAAKERKNGKLAKVIDLLLVPKTYIRCETLASEGLRAVRYAVNRIDAEMPATAVMKLSQSDAAGLRAFQNIFIRSRLQLIGMTHGIMEYILENLERYVRNDIKFVDYERREIRRRHQVSEILYRYVCHSVSPVAPVAHQLMEANIVKTLATEYTYAAAQMLQKLLGAKGFERGHTAGNIAIDIRPFTIFEGPNDMLYAEIYDQFVRATAEEKEAGMKLDKNQTLLDRLQTDARFAAVARDYTLPEDIRSFLQEHTLTDACALQKVFIGKIIARLFVFVQAKHEDTAAFLLNDIRKDILDCRYCG

SEQ ID NO: 1830 - protein, 1379 aa, Neisseria
MTYPIPKPREKSRWPNLSQGSLPLALARYLPHKRLKVVLTQDAEQALRLQTAWRFFRPHDTAVFLPDWETLPYERFSPHQDLVSERLSALWQIKSGAADVLFVPVATAMQKLPPVPFLAGRTFWLKTGQTLDIGRLKSDLVDAGYNHVSHVVAAGEFAVRGGIVDLFPMGSEMPYRIDLFDDEIDSIKTFDTETQRTISPVSEIRLLPAHEFPTDSEAQKIFRSRFREEVDGNPNDAAVYKAVSNGHFGAGVEYYLPLFFENELETLFDYIGEDALFVSLDDVHAEANRFWSDVKSRYAMAQGDETYPPLLPQYLYLSADVFAGRLKNYGQVLPDVSGKEYTLPDLAVNRQADEPLQALKDFQTAFDGRILLCAESLGRRETMLGFLQQNGLKAKPVSDWQGFLSAHEPLMITVAPLAYGFKLGGLQSPNQQQPTPSPVGEGWGEGKAVAAQTEFSAAAINPLPSPLPQEREQSAAAVSDSLKAAAVSTESSLPLGTSNLHGQIRQQPAPSPVGEGWGEGKAVAAQTEFPASATNPLPSPLPQEREQSAAAVSDDLKTKSSLHPVANNLHGQIRQQPTPSPVGEGWGEGKAVAAQTEFSAAATNPLPSPLPQEREQSAAVVSDSLKAAAVSTESSLPPGKSNLHGQIQQQPAPSPVGEGWGEGKAVAAQSAIAVITESDLYQYVARSRIHNRRKKHAAVSDGLLRDLAEINIGDPVVHEEHGIGRYMGLVTMDLGGETNEMMLLEYAGEAQLYVPVSQLHLISRYSGQAHENIALHKLGSGAWNKAKRKAAEKARDTAAELLNLYAQRAAQSGHKFEINELDYQAFADGFGYEETEDQAAAIAAVIKDLTQAKPMDRLVCGDVGFGKTEVALRAAFVAVMGGKQVAVLAPTTLLVEQHAQNFADRFADFPVKVASLSRFNNSKATKAALEGMADGTVDIVIGTHKLVQDDIKFKNLGLVIIDEEHRFGVRQKEQLKRLRANVDILTMTATPIPRTLSMALEGLRDFSLITTAPSRRLAVKTFVKPFSEGSVREAVLRELKRGGQVFFLHNEVDTIENMRERLETLLPEARIGVAHGQLRERELEQVMRDFLQQRFNVLLCSTIIETGIDIPNANTIIINRADKFGLAQLHQLRGRVGRSHHQAYAYLLTPEYITKDAEKRLDAIAAADELGAGFTLAMQDLEIRGAGEILGEGQSGEMIQVGFTLYTEMLKQAVRDLKKGRQPDLDAPLGITTEIKLHSPALLPEDYCPDIHERLVLYKRLAVCETVQQINTIHEELVDRFGLPEQPVKTLIESHHLRLMAKELGIDAIDAAGEAVTVTFGKNNNVDPTEIILLIQNDKKYRLAGADKLRFTAEMENIEVRINTVKNVLKTLQNRCLPK

SEQ ID NO: 1831 - protein, 127 aa, Neisseria
MFRTMLGGKIHRATVTEADLNYVGSITVDQDLLDAAGIYPNEKVAIVNNNNGERFETYTIAGKRGSGVICLNGAAARLVQKGDIVIIMSYVQLSEPEIAAHEPKVVLVDGNNKIRDIISYEPPHTVL

SEQ ID NO: 1832 - protein, 280 aa, Neisseria
MDIKINDITLGNNSPFVLFGGINVLESLDSTLQTCAHYVEVTRKLGIPYIFKASFDKANRSSIHSYRGVGLEEGLKIFEKVKAEFGIPVITDVHEPHQCQPVAEVCDVIQLPAFLARQTDLVVAMAKTGNVVNIKKPQFLSPSQMKNIVEKFHEAGNGKLILCERGSSFGYDNLVVDMLGFGVMKQTCGNLPVIFDVTHSLQTRDAGSAASGGRRAQALDLALAGMATRLAGLFLESHPDPKLAKCDGPSALPLHLLEDFLIRIKALDDLIKSQPILTIE

SEQ ID NO: 1833 - protein, 146 aa, Neisseria
MMQTFRKISRYVATLWLGMQIMAGYIAAPVLFKMLPKMQAGEIAGVLFDILSWSGLAVWGAVLAAAFAALTRRQTALLLFLLSALAANRFLITPVIEALKYGHENWLLSFVGGSFGMWHGISSIVFMATALLSAVLSWRLSGKDAV

SEQ ID NO: 1834 - protein, 428 aa, Neisseria
MSAIVDIFAREILDSRGNPTVECDVLLESGVMGRAAVPSGASTGQKEALELRDGDKSRYSGKGVLKAVEHVNNQIAQALIGIDANEQSYIDQIMIELDGTENKGNLGANATLAVSMAVARAAAEDSGLPLYRYLGGAGPMSLPVPMMNVINGGEHANNSLNIQEFMIMPVGAKSFREALRCGAEIFHALKKLCDSKGFPTTVGDEGGFAPNLNSHKEALQLMVEATEAAGYKAGEDVLFALDCASSEFYKDGKYHLEAEGRSYTNAEFAEYLEGLVNEFPIISIEDGMDENDWEGWKLLTEKLGGRVQLVGDDLFVTNPKILAEGIEKGVANALLVKVNQIGTLSETLKAVDLAKRNRYASVMSHRSGETEDSTIADLAVATNCMQIKTGSLSRSDRMAKYNQLLRIEEELAEAADYPSKAAFYQLGK

SEQ ID NO: 1835 - protein, 92 aa, Neisseria
MKWVTVVLSFALVCCQYSLWFGKGSIGRNSSLREQIAVQEEKNQTLALRNHSLAAEVYDLENGQEAISEIARVELGYIQDGETFYRLIRHNR

SEQ ID NO: 1836 - protein, 96 aa, Neisseria
MARIGTNKGFFELLEGETLLEGLERTGHMVEYQCRSGYCGSCRVKILEGSVTYREPPLAFLGRDEILPCCCCVEGDVRLDCGLSGEDEGLSDSLLK

SEQ ID NO: 1837 - protein, 384 aa, Neisseria
MSCEHLTMSYSTFPKTKNDALNEPMFFGQPVNVARYDQQKYEVFEKLIEKQLSFFWRPEEIDVSRDRIDYANLPEHEKHIFISNLKYQTLLDSIQGRSPNVALLPLVSIPELETWIETWSFSETIHSRSYTHIIRNIVNDPSVVFDDIVENEYITARAEDIACYYDDLIEYTQYYNLLGEGVHNVGGKPVTVSLRGLKKKLYLCLMCVNVLEAIRFYVSFACSFAFAERELMEGNAKIIKLIARDEALHLTGTQHMLNLMRSGVDDSEMAEIAAELQDECFQLFKKAAEQEKEWAAYLFKDGSMIGLNKEILSQYVEYITNLRMQAVGLPAGFEGANQNPIPWINAWLSSDNVQVAPQEVEISSYLIGQIDSEVNTDDLGDFEL

SEQ ID NO: 1838 - protein, 395 aa, Neisseria
MNDLAAQTIQVVNKSDDLVASAIQTANKSIAVYCRYIRPNDVGTTGSHQSGFYIQKHFSDDLFDVVCQKGTNKTISIKINWQDGSVTNSNFKYYGQGTRNEARITGFGKNFEFLSDKYSGSLLVLCRACYKDLLFHAFVLSSDEDIEIFIAETNILPGSLYLPKKQEVEDNLTKLFSLFPNFPKTEEMAVLARENIALNKTNVSNVLKQWVSKEYELFSIFEKREFEIIKSKITDLDSFINFAHSFTNRRKARAGKSLELHLSRIFDEFSLKFETQAKTEGKKKPDFLFPGSEEYHAMDESGNFIFQTEKLTMLGSKTTCKDRWRQVLNEADRIPHKHLFTLQEGISDTQIQEMSDENLTLVVPKESVKTFGTFGKTHVLTLENFIKYIKSQQVS

SEQ ID NO: 1839 - protein, 337 aa, Neisseria
MKNKIQNQLDNIVTLNNEKFTFIDLFAGIGGFRIAMENVGGRCVFSSEWDDKARQTYQVNFNDIPYGDITLKETKAAIPSKFDVLTAGFPCQPFSIAGVSKKKSLGRETGFLDKAQGTLFFDVAEIIGKHRPKIFLLENVKNLVSHDKGNTFKVIKGTLEELDYQIFYQVMNAKYYVPQNRERIFIVGFDRQYFNKEINFNFPSPPESQPKLKQILEDDVDNSFTLSDNLWLYLQNYAKKHKAKGNGFGFGLVDLDGISRTLSARYYKDGSEILIPQKGKNPRKLTPRECSRLMGFPKDFVIDAVSKTAAYKQFGNSIAVPLVQAIAKQIINELKNE

SEQ ID NO: 1840 - protein, 759 aa, Neisseria
MNTPTDLKVTKRDGRLEAIDLDKIHRVVTWAADGLENVSVSQVELKSHIQFYNGIRTDDIHETIIKAAADLISEDTPDYQYLAARLAIFHLRKIAYGEYEPPHLYDHVKKLTDAGKYDRHILEDYSREEFDELNAYIDHERDMSFSYAAVKQLEGKYLVQNRVTRQIYETPQFLYVLVAMCLFSKYPKEARLGYVKRFYDAVSTFKVSLPTPIMSGVRTPTRQFSSCVLIECDDSLDSINATTSAIVKYVSQRAGIGINAGRIRGLDSEIRGGEARHTGCIPFFKMFQAAVKSCSQGGVRGGAATLFYPLWHIEAESLLVLKNNRGVEDNRIRQLDYGVQINRLLYTRLIKGGNITLFSPNEVPGLYEAFFADQDEFERLYTKYEQDPDIRKRIIPAADLFSTLMQERAGTGRIYIQNVDHCNTHSPFDPRVAPVHQSNLCMEIALPTKPLDNINDPNGEIALCTLSAFNLGALNSLDELEGLADLTVRALDALLDYQGYPVEAARTSTMGRRSLGIGVINYAYYLAKNGVRYSDGSALGLTHRTFEAIQYYLLKASANLAKEYGACTLFNQTVYSQGKLPIDTYKKDLDAVCGEPLHYDWESLRAEIVKYGLRNSTLTALMPSETSSQIANATNGIEPPRGLVTVKASKDGILKQVVPEFETLKNAYETLWQLPGNEGYLKLVGVMQKFVDQSISANTAYDPGKFEGGKVSMKQMLKDLLTAYKYGVKTLYYHNTRDGADDTQTDIQDDGCAGGACKI

SEQ ID NO: 1841 - protein, 62 aa, Neisseria
MSAAARQNHTLQNLTICRGRKQEAFLFRRKILISPPCSRSRSKGKKFTRFLSVKNYQIKQIL

SEQ ID NO: 1842 - protein, 108 aa, Neisseria
MSVKKMLAILLSAILGLVSTTAAAGTSEPAHRDTKHIRKANKQMLHPECRKYLERRAAWYRSQGNVQELRENKKARKAFRSLPYAEQKIQCRAAYEAFDDFDGGSFRR

SEQ ID NO: 1843 - protein, 255 aa, Neisseria
MSSNKASFFTRLRRLCRLAVWLFKTGKNLRGIDGGCPESRNRAVIELGRGVLAALDIGLEVGRPAPEHPNGVLVAANHVSWLDIFAMSAVYPSSFIAKQEIKSWPVLGKMGQNAGTVFINRNSRRDIEPINRAVCETLQRGQNVSFFPEARTSSGLGLLPFKAALFQSAIDAGAKVLAVALRYYDETGKRTARPSYADVGLPTCLWRIVSMKKLTIRVDFVCVADAAESEDRYALKDKIEESIRAVVADDADIAV

SEQ ID NO: 1844 - protein, 275 aa, Neisseria
MPELPEVETTLRGIAPHIEGKTVEAVVLRQLKLRWQINPDLGEILSGRQVLSCGRRAKYLLIRFQTGVLLIHLGMSGSLRIFTPSDGRIGRPDRHDHVDIVFSDGTVMRYRDPRKFGAILWYEGIEEHHPLLEKLGPEPLSEAFCADYLYARLKAQKRAVKLALMDNAVVVGVGNIYANESLFRAGISPHRPANRLKKKECALLVETVKAVLQRAIETGGSTLRDFVDSDGKSGYFQQEYTVYGRHNQPCPRCGGLVVKETLGQRGTFYCPNCQK

SEQ ID NO: 1845 - protein, 221 aa, Neisseria
MDAWFEDTAMGRYVAKLEQDFFGRYLDSYRFSGMCAVQVGGPWLSLSEDVVCVPRDMSMSAENMALADVSADMLLFPHTLEGGVPSQILSEAHRILKPCGRLMLTGFNPYSLWGFSRWFDGERLPEKRFCLPLPELKRRLADVGFDIEFGKFMVYLPPVSSLGQIRFWRFMEKAGDRWWPQCAAVYGLVLVKRAAGVTPLPAWDGYLGGKALAAGAARVAD

SEQ ID NO: 1846 - protein, 658 aa, Neisseria
MSKLKTIALTASGLSVCPGFLYAQNTSSHQIGLAIMRLNSSILDLPPTKQYFQSGSLWGELRQGFRMGEVNPELVRRHESKFIASHSYFNRVINRSRPYMYHIANEVKKRNMPAEAALLPFIESAFVTKAKSHVGASGLWQFMPATGRHYGLEKTPVYDGRHDVYAATDAALNYLQYLYGLFGDWPLAFAAYNWGEGNVGRAINRARAQGLEPTYENLRMPNETRNYVPKLLAVRNIIATPQSFGMNISDIDNKPYFQAVEPDRPLDNEAIARLAGITQSELLALNPAFNVPAFIPKSKRKLLLPVASVQTFQSNYLNAAPDSLFSWEVYTPAAKTSLSDISTATGMSIADIKRLNNLNGNLVNAGRSILVAKNGKTLQTASESVVSIDIDNTPDTYRSNMPAGTVNVGIARIRPAAAQTADITVAPLPQKTVRTEPDPLVRIAEPALATAAAQPQTEKQTAMPSETQTATLAQIIPQNDMQAADELMQLVARNNLRRQAEETISAVIGTPDTVAEHKISASPQHTAAADGKRRVRLETRVAKAADGEAEISPLHASIHRVVEGDTLFNIAKRYNVSVADLIVANNIKGNTIQKGQVLRLAQAAPAQTRIEKVSYTARKGDTFKSIAARFNIHIDDIRRLNPNLNTINPGQRVKLIGS

SEQ ID NO: 1847 - protein, 230 aa, Neisseria
MKLIKYLQYQGIGSRKQCQWLIAGGYVFINGTCMDDTDADIDSSSVETLDIDGEAVTVVPEPYFYIMLNKPEDYETSHKPKHYRSVFSLFPDNMRNIDMQAVGRLDADTTGVLLITNDGKLNHSLTSPSRKIPKLYEVTLKHPTGETLCETLKNGVLLHDENETVCAADAVLKNPTTLLLTITEGKYHQVKRMIAAAGNRVQHLHRRRFAHLETENLKPGEWKFIECPKF

SEQ ID NO: 1848 - protein, 218 aa, Neisseria
MNRQKVIAIDGPGASGKGTVAARVAAALGYDYLDTGALYRLTALYAQKQGVGWHDEENVSELAKKLPAVFSGSRILLGGEDVSDGIRTEAIGMGASAVAQLPKVRAALLQRQRDFLTEKGLVADGRDTGSVVFPQAELKIFLTAESKIRAERRAKQIGIPCEGLAFERILSDIEARDEADRNRKVAPLKQQPDALLLDTSRLTIEETVKKVLDWYREV

SEQ ID NO: 1849 - protein, 561 aa, Neisseria
MSMENFAQLLEESFTLQEMNPGEVITAEVVAIDQNFVTVNAGLKSESLIDVAEFKNAQGEIEVKVGDFVTVTIESVENGFGETKLSREKAKRAADWIALEEAMENGDILSGIINGKVKGGLTVMISSIRAFLPGSLVDVRPVKDTSHFEGKEIEFKVIKLDKKRNNVVVSRRAVLEATLGEERKALLENLQEGSVIKGIVKNITDYGAFVDLGGIDGLLHITDLAWRRVKHPSEVLEVGQEVEAKVLKFDQEKQRVSLGMKQLGEDPWSGLTRRYPQGTRLFGKVSNLTDYGAFVEIEQGIEGLVHVSEMDWTNKNVHPSKVVQLGDEVEVMILEIDEGRRRISLGMKQCQANPWEEFAANHNKGDKISGAVKSITDFGVFVGLPGGIDGLVHLSDLSWTESGEEAVRKYKKGEEVEAVVLAIDVEKERISLGIKQLEGDPFGNFISVNDKGSLVKGSVKSVDAKGAVIALSDEVEGYLPASEFAADRVEDLTTKLKEGDEVEAVIVTVDRKNRSIKLSVKAKDAKESREALNSVNAAANANAGTTSLGDLLKAKLSGEQE

SEQ ID NO: 1850 - protein, 104 aa, Neisseria
MTKSELMVRLAEVFAAKNGTHLLAKDVEYSVKVLVDTMTRSLARGQRIEIRGFGSFDLNHRPARIGRNPKTGERVEVPEKHVPHFKPGKELRERVDLALKENAN

SEQ ID NO: 1851 - protein, 135 aa, Neisseria
MTYTTAKAAEKIGISAHTLRFYDKEGLLPNIGRDEYGNRCFTDNDLQWLGLLQCLKNTGMSLKDIKRFAECTVIGDDTIEERLSLFENQIENVKCQIAELKRYLDLLEYKLAFYQKAKALGSVKAVNLPQIPETA

SEQ ID NO: 1852 - protein, 378 aa, Neisseria
MEMKQADSTIKSRAAVAFAPNQPLQIVEIDVEMPRKGEVLIRNTHTGVCHTDAFTLSGSDPEGVFPVVLGHEGAGVVVAVGEGVSSVKPGDHVIPLYTAECGECEFCCSGKTNLCVSVRDTQGKGLMPDGTTRFSYQGQPIYHYMGCSTFSEYSVVAEVSLAKINPEANHEQVCLLGCGVTTGIGAVHNTAKVQEGDSVAVFGLGAIGLAVVQGARQAKAGRIIAIDTNPSKFELAKQFGATDCLNPNDYDKPIKDVLLDINKWGIDHTFECIGNVNVMRQALESAHRGWGQSIIIGVAGAGQEISTRPFQLVTGRVWKGSAFGGVKGRSELPKMVEDSMKGDIELEPFVTHTMTLDQINKAFDLMHEGKSIRAVIHY

SEQ ID NO: 1853 - protein, 275 aa, Neisseria
MKLIEQHQIFGGSQQVWAHHAQTLQCEMKFAVYLPNNPENRPLGVIYWLSGLTCTEQNFITKSGFQRYAAEHQVIVVAPDTSPRGEQVPNDDAYDLGQSAGFYLNATEQPWAANYQMYDYILNELPRLIEKHFPTNGKRSIMGHSMGGHGALVLALRNQERYQSVSAFSPILSPSLVPWGEKAFTAYLGKDREKWQQYDANSLIQQGYKVQGMRIDQGLEDEFLPTQLRTEDFIETCRAANQPVDVRFHKGYDHSYYFIASFIGEHIAYHAAFLK

SEQ ID NO: 1854 - protein, 383 aa, Neisseria
MSNRDQLFKAPPFENHSPLTWYQAASQLPNFIRDDAQAAAIEHLDRLWTELMMFKRKRNRFLGRSLRSPQVPKGLYFYGGVGRGKSFLMDAFFGCLPYRRKRRVHFHAFMAEIHQRLKTLKSESNPLKSVAAEIAKETRVLCFDEFHVSDIADAMILGRLLENLLNEGVVLVATSNYAPSELYPQGQNRSSFLPTIALIESSLTVLNVDGGEDYRLRTLRPAEIFFTPANEENEAKLAKLFKEMTGITDLNPGISTIHGREIPHKAESGRAIWFDFRALCFGPRSQSDYLYLAEHYEMVFISGLEQLSPQEKAEARRLTWLIDVLYDFRVKLCATGAVDVNHIYTEGDFAEEFTRTASRMVEMQSEVYLEQPHLTLSPKASGG

SEQ ID NO: 1855 - protein, 141 aa, Neisseria
MAIERTISIIKPDAVGKNVIGKIYSRFEENGLKIVAAKMKQLTLKEAQEFYAVHKDRPFYAGLVEFMTGGPVMIQVLEGENAVLKNRELMGATNPSEAAEGTIRADFATSVSINAVHGSDSVENAALEIAYFFSQTEICPR

SEQ ID NO: 1856 - protein, 364 aa, Neisseria
MKTNLLNYDLQGLTRHFADMGEKPFRAKQVMRWMHQSGAQNFDEMTDLAKSLRHKLNEQAGIEIPKLMMSQKSSDGTRKWLLDVGTGNGVETVFIPESDRGTLCISSQVGCALECTFCSTGRQGFNRNLTAAEIIGQLWWANKAMGVTPKNERVISNVVMMGMGEPMANFDNVVTALSIMLDDHGYGLSRRRVTVSTSGMVPQMDRLRDVMPVALAVSLHASNDEVRNQIVPLNKKYPLKELMAACQRYLVKAPRDFITFEYVMLDGINDKAQHARELIELVTDVPCKFNLIPFNPFPNSGYERSSNENIRVFRDILQQAGFVVTVRKTRGDDIDAACGQLAGQVQDKTRRQQKWQQILIGQQG

SEQ ID NO: 1857 - protein, 253 aa, Neisseria
MPFKPSKRISLLLVLALGACSTSYRPSRAEKANQVSNIKTQLAMEYMRGQDYRQATASIEDALKSDPKNELAWLVRAEIYQYLKVNDKAQESFRQALSIKPDSAEINNNYGWFLCGRLNRPAESMAYFDKALADPTYPTPYIANLNKGICSAKQGQFGLAEAYLKRSLAAQPQFPPAFKELARTKMLAGQLGDADYYFKKYQSRVEVLQADDLLLGWKIAKALGNAQAAYEYEAQLQANFPYSEELQTVLTGQ

SEQ ID NO: 1858 - protein, 421 aa, Neisseria
MNTLQRRKTHQVRIDHITVGSEAPVVIQSMTNTDTADAKATALQIKELSDAGSEMVRITVNSPEAASKVAEIRRRLDDMGYATPLIGDFHFNGERLLAEFPECGKALSKYRINPGNVGKGVKGDEKFAFMIRTAAENDKAVRIGVNWGSLDQSLAKRMMDANLASSAPKPPEEVTKEALIVSALESAEKAVLLGLPEDKIILSCKVSAVQDLIQVYRELGSRCAYPLHLGLTEAGMGSKGIVASTAALSVLLQEGIGDTIRISLTPEPGSPRTQEVVVGQEILQTMGLRSFTPMVTACPGCGRTTSTVFQELAQDVQNYLRQKMSIWRTLYPGVESLNVAVMGCVVNGPGESKLADIGISLPGTGETPVAPVYVDGERKVTLKGDNIATEFLAIVEEYVKTNYGENGLKRHQGKVIPIHSL

SEQ ID NO: 1859 - protein, 78 aa, Neisseria
MPSESQMGQQFLQGRDTRILLNLPVRLLRKDKGRKRYPAFLIYTCNSSPYLPIVFSYCASIPYRFKKMPFPMGWVLYQ

SEQ ID NO: 1860 - protein, 176 aa, Neisseria
MKERIVFLVGPVTDESANLVVAQLLFLESENPDKDIFFYINSPGGSVTAGMSIYDTMNFIKPDVSTLCLGQAASMGAFLLSAGEKGKRFALPNSRIMIHQPLISGGLGGQASDIEIHARELLKIKEKLNRLMAKHCDRDLADLERDTDRDNFMSAEEAKEYGLIDQILENRASLRL

SEQ ID NO: 1861 - protein, 437 aa, Neisseria
MMSVTVETLENLERKVVLSLPWSEINAETDKKLKQTQRRAKIDGFRPGKAPLKMIAQMYGASAQNDVINELVQRRFYDVAVAQELKVAGFPRFEGVEEQDDKESFKVAAIFEVFPEVVIGDLSAQEVEKVTASVGDAEVDQTVEILRKQRTRFNHVEREARNGDRVIIDFEGKIDGEPFAGGASKNYAFVLGASQMLPEFEAGVVGMKAGESKDVTVNFPEDYHGKDVAGKTAVFTITLNNVSEATLPEVDADFAKALGIADGDVAKMREEVQKNVSREVERRVNEQTKESVMNALLKAVELKAPVALVNEEAARLANEMKQNFVNQGMADAANLDLPLDMFKEQAERRVSLGLILAKLVDENKLEPTEEQIKAVVANFAESYEDPQEVIDWYYADPSRLQAPTSLAVESNVVDFVLGKAKVNEKALSFDEVMGAQA

SEQ ID NO: 1862 - protein, 812 aa, Neisseria
MTEKSHKKTAKGRAGSPSPTSARNKKADNGARGNKVSERLKAVKELQKTETKKARPEHVVNLIGDALWLMGLAATLYLAISLISFDMGDPSWSHSSPVVEDVANWGGLFGAYVADVGYYLFGWSFWWWIAAACVVLYKNFRLHAKQTENEAYNHKIAAAALFVLTVFSPVLEYFVLGGKYADSLPVGAGGMVGIRVGAVFAWLLGKSGSLLIILVVLLLSLSLLVQISWLEFLNGAGRAVQNRLSALSGKVMALGKRRPNTKTDGVDTQNTRRMVKEAKNITAKPVALPEGSSSNRKSVAVSVAPPPKIQVSLFEDDEPRQAGEYHKPTLNLLRIPDSEPVSINPAELERTAELIESKLAEFGIGVQVVSATSGPVITRYEIEPAQGVKGSQIVALSKDLARSMSLQSVRIVETIAGKNTMGIELPNDKRQDVMLSEILSSPVFAEAKSKLTVALGKDIAGTPVVGDLAKMPHLLVAGMTGSGKSVGVNGMIMSMLFKATPDEVRFIMIDPKMLELSIYDGIPHLLCPVVTDMREAGQALNWCVAEMEKRYRLLSHAGVRNLEGFNQKVEAAKAAGKPLLNPFSLNPDEPEPLEKLPLIVVVIDELADLMMTERKAVEQQIARLAQKARAAGIHMIVATQRPSVDVVTGLIKANIPTRMAFTVQSKIDSRTILDQMGADELLKYGDSLFLQPGSAEPTRLQGAFVSDDEVHQVVNYVKSQAPADYIEGLLSGEAALETANIVNPNADSDELFDQAVAYVLESKKTSISSLQRQLRIGYNRAANLMEALENAGVVSSTDLNGSRKILAHKDHL

SEQ ID NO: 1863 - protein, 403 aa, Neisseria
MNQLKLAVSGAQILFVAFGAMVLVPLLTGLNPALALLGAGLGTLLFQITTKRKVPIFLGSSFAFIAPIIYSVGEWGLPSTMFGLFAAGFMYFVFAALIRWRGLAAVHKLLPPVVIGPVIMVIGLSVAVAASSMAMGQADGKQVIDYTDSLILSGFTFAVTAIVSVFGSRMMKLIPILIGVASGYVLALLMGLVDTASIAHAPWFAVPHFETPQINWQAALFMLPVAVAPAIEHIGGIMAIGNVTGKDYTKDPGLDKTLAGDGLGVCVAGLIGGPPVTTYGEVTGAVMITKNSNPVIMTWAAVFAVCMAFFGKFNAFLASIPMPVMGGIMLLLFGTIASLGVKTLIDAKVDLMLPKNLVIVSSVLTTGIGGMTLKLGSFSFAGVGLCAVLAIMLNSLLPDPKES

SEQ ID NO: 1864 - protein, 146 aa, Neisseria
MNQRAHSSAVIRRRCAIHCFQAALSLYAVFFDALVECDLMNARKTRRSNHDGVVDTQRAQGFRVCQRDTGIVQRHDRPASGRLVFSNARKRVLTFAEGFQLGKRFAFRRIFFCGFNLQNIVRILRILPNGEIAVSIGSPCRRSHQA

SEQ ID NO: 1865 - protein, 134 aa, Neisseria
MANRFQQRKSAYRRLSGKPLFSDGIAANLCGGRKTLSYNLSRFKISIRSEMQKISFNLLKPANSPKIGKRRPGLNGAPHIPMPSPRYLPASPEMPGNNIHPAKIRNNTPGGRQSQTAPQSIRHQKNKPPPRASS

SEQ ID NO: 1866 - protein, 248 aa, Neisseria
METPTNTPQRSLRQNSIYLLPNSFTIAALFSAFYAITQSMHGRYETAAIAVFISMLLDGMDGRVARLTNSQSAFGEQLDSLADMVSFGVAPALIAYKWQLWQFGKIGYSVAFIYCACAALRLALFNTLIGKVDKRWFIGVPSPTAAALIVGLIWVNHSVEKFPAVHWWALGITLFAGLSMIVQIPFWSFKEINIRRQVPFVGMLLAVLLLLLVTWEPSLVLFLFFLGYSLSGYIMAARRFWKKYRKAD

SEQ ID NO: 1867 - protein, 257 aa, Neisseria
MWHWDIILILLAVGSAAGFIAGLFGVGGGTLIVPVVLWVLDLQGLAQHPYAQHLAVGTSFAVMVFTAFSSMLGQHKKQAVDWKTVFTMMPGMIFGVFTGALSAKYIPAFGLQIFFILFLTAVAFKTLHTDPQTASRPLPGLPGLTAVSTLFGTMSSWVGIGGGSLSVPFLIHCGFPAHKAIGTSSGLAWPIALSGAISYLLNGLNIAGLPEGSLGFLYLPAVAVLSAATIAFAPLGVKTAHKLSSAKLKKSSALCCF

SEQ ID NO: 1868 - protein, 150 aa, Neisseria
MQIILLEKIGGLGNLGDIVTVKNGYARNFLIPAGKAKRATEANMKEFEARRAELEAKQAEILADARVRQEKLDGQTVTVAQKAGVDGRLFGSVTNADIAAAIVAAGIEAVKANVRLPNGPLKAVGEYEVEVALHTDAVAKITVAVVAATE

SEQ ID NO: 1869 - protein, 76 aa, Neisseria
MARQSFKRRKFCRFTAEKIQEVDYKQVDLLKDFISENGKIIPARITGTKAFYQRQLAVAVKRARFLALLPYTDQHK

SEQ ID NO: 1870 - protein, 100 aa, Neisseria
MGFNNLVSLAALIEKVFPIRYTPAGIPVLDIILKHESWQEENGQQCLVQLEIPARILGRQAEEWQYRQGVYVHVEGFLAQKSRRSLMPMLRIQNIQEYKG

SEQ ID NO: 1871 - protein, 122 aa, Neisseria
MRHYEIVFIVHPDQSEQVPAMVERYKTMIAEANGKIHRLEDWGRRQLAYPINKIHKAHYVLMNIETTPEVVEELETAFRFNDAILRHLTIKTKHAVTEASPMLGGEKAKNLLSGASEEAVAQ

SEQ ID NO: 1872 - protein, 316 aa, Neisseria
MSQHRKLIILGSGPAGYTAAVYAARANLNPVIITGIAQGGQLMTTTEVDNWPADADGVQGPELMARFLAHAERFGTEIIFDQINAVDLQKRPFTLKGDMGEYTCDALIVATGASAKYLGLPSEEAFAGKGVSACATCDGFFYKNQDVAVVGGGNTAVEEALYLANIAKTVTLIHRRSEFRAEKIMIDKLMKRVEEGKIILKLESNLQEVLGDDRGVNGALLKNNDGSEQQIAVSGIFIAIGHKPNTDIFKGQLEMDEAGYLKTKGGTADNVGATNIEGVWAAGDVKDHTYRQAITSAASGCQAALDAERWLGSQNI

SEQ ID NO: 1873 - protein, 720 aa, Neisseria
MQQKIRFQIEGMTCQACASRIEKVLNKKDFVESAGVNFASEEAQVVFDDSKTSVADIAKIIEKTGYGAKEKTEDTLPQPEAEHHIGWRLWLLFTINVPFLIGMAGMMIGRHDWMIPPLWQFALASVVQLWLAIPFYKSAWASIKGGLANMDVLVTIGTVSIYLYSVYMLFFSPHAAYGMAHVYFEVGVMVIGFVSLGKFLEHRTKKSSLNSLGLLLKLTPTQVNVQRNGEWKQLPIDQVQIGDLIRANHGERIAADGIIESGSGWADESHLTGESNPEEKKAGGKVLAGALMTEGSVVYRATQLGSQTQLGDMMNALSEAQGSKAPIARVADKAAAVFVPAVVGIALLTFIVTWLIKGDWTVALMHAVAVLVIACPCALGLATPAAIMVGMGKAVKHGIWFKDAAAMEEAAHVDAVVLDKTGTLTEGSPQVAAVYCVPDSGFDEDALYRIAAAVEQNAAHPLARAIVSAAQARGLDIPAAQNAQTVVGAGITAEVEGVGLVKAGKAEFAELALPKFLDGVWDIASIVAVSVDNKPIGAFALADALKADTAEAIGRLKKHNIDVYIMSGDNQGTVEYVAKQLGIAHAFGNMSPRDKAAEVQKLKAAGKTVAMVGDGINDAPALAAANVSFAMKGGADVAEHTASATLMQHSVNQLADALLVSQATLKNIKQNLFFAFFYNILGIPLAALGFLNPVIAGAAMAASSVSVLSNALRLKRVKID

SEQ ID NO: 1874 - protein, 617 aa, Neisseria
MNKETRFPEHFDIPLFLKNLPNLPGVYRFFNESGNVLYVGKAVNLKRRVSGYFQKNDHSPRIALMVKQVHHIETTITRSESEALILENNFIKALSPKYNILFRDDKSYPYLMLSGHQYPQMAYYRGTLKKPNQYFGPYPNSNAVRDSIQVLQKVFMLRTCEDSVFEHRDRPCLLYQIKRCTAPCVGHISEEDYRDSVREAATFLNGKTDELTRTLQHKMQTAAANLQFEEAARYRDQIQALGIMQSNQFIDSKNPNNPNDIDLLALAVSDGLVCVHWVSIRGGRHVGDKSFFPDTKNDPEPNGQDYAEAFVAQHYLGKSKPDIIISNFPVPDALKEALEGEHGKQMQFVTKTIGERKVRLKMAEQNAQMAIAQRRLQQSSQQHRIDELAKILGMDSDGLNRLECFDISHTQGEATIASCVVYDEQNIQPSQYRRYNITTAKPGDDYAAMREVLTRRYGKMQEAEANGETVKWPDAVLIDGGKGQIGVAVSVWEELGLHIPLVGIAKGPERKAGMEELILPFTGEVFRLPPNSPALHLLQTVRDESHRFAITGHRKKRDKARVTSSLSDIPGVGSKRRQALLTRFGGLRGVIAASREDLEKVEGISKALAETIYNHLH

SEQ ID NO: 1875 - protein, 467 aa, Neisseria
MNNPDLPYRQALECLSQKQYNFTEVRRLLTEAFSAGHPAAAFELAKHLMDADSPYQDREQGMEMLRIAAEQGHPYARYNLAYIQELEGAPPETLIPLYRPLAEEGLPEAQVRLMYLLYASRHFEEALEWAKTSAKNNNPHGQYLLAQYCRYGTPPDFETAHLLYRKSAAQGLPEAHWQLGLQYRFGQGTKVDTAQAVNHLRAAAQQGYIPAYTPLAELILPTAPDEAVHWFQQAAQENDPDAHAALADIYLQGKHLERNHKLALHHAEAAAAERHPEGLRILGDICRYGLGIAPDTEKARHYYRQAAEAGSLSAYQKLISDSALNHPDQYGGIKDSAIRRQRAERLYQKAQALHYGLQCAPEYAAALKLYTEAAELGHSKAQTNLGSMYYFGQGMTADYNEARKWFEKAAAKKDSMAFYNLACIHYSGHGVEPDKEKACRYLQEAINNGYGQKSVLQELLQQWQNAV

SEQ ID NO: 1876 - protein, 238 aa, Neisseria
MTDTAENQTQNNWQAGHPRSIRSFVLRQSHMTAAQQRAIDTLWDSFGIDYQATPADLDARFGSSRPKILEIGFGMGTATAEIARRLPETDFLAIDVHGPGVGNLLKLIDENHLENIRVMRHDAVEVVENMLQDGSLDGIHIFFPDPWHKKRHHKRRLIQAPFIAKLLPKLKTGGYIHLATDWEEYAQQMLEVLSSFDSLQNTAADYAPTPDYRPETKFEARGKRLGHGVWDLVFKRIG

SEQ ID NO: 1877 - protein, 64 aa, Neisseria
MDCNDGNVEGFVGYKYPTYACCYISFDLMTKYDKVKVQITASMICFFRLLSFHDIDISSFSFSL

SEQ ID NO: 1878 - protein, 120 aa, Neisseria
MSQLDFNLELFIKNSNFDDYKIFDIVKEAIETQDEIGSILRTHLFFERILEAWIYAKCNKEDFFNDTQIGFRTKLKIARNLGLFSEVYDIGERLNKIRNTIAHHVLREVNQENLTLYMKV

SEQ ID NO: 1879 - protein, 675 aa, Neisseria
MEVIQYPNSPFKLHQPFPPAGDQPTAIAGLLEGLSDGLAYQTLLGVTGSGKTYTMANVIAQSGRPAIIMAHNKTLAAQLYAEMREFFPENAVEYFVSYYDYYQPEAYVPSRDLFIEKDSAINEHIEQMRLSATKNLMTRNDVIIVATVSAIYGIGDPTEYQQMVLSVKEGDTIEQRDIIATLVSMQYERGDLDFKRGSFRVRGDVIDVYPAESSENALRISLFDDEIDRLDMFDPLSGSLIQRVGRYTVFPSSHYVTPRDTVLRACESIKEELRERIEFFAREQRPVEQQRIEQRTRFDLEMLYEMGFCKGIENYSRHFSGKKEGEPPPTLMDYLPDNAIMFIDESHVTVTQIGGMYKGDASRKQNLVDYGFRLPSARDNRPLKFHEFEKVMPQTIFVSATPAKYEEEHAGQVVEQVVRPTGLVDPQIIIRPVATQVDDLMSEINDRIEKGERVLVTTLTKRMAEQLTDYYSELGIKVRYLHSDIDTVERVEIIRDLRLGLFDVLVGINLLREGLDIPEVSLVAILDADKEGFLRSHRSLIQTIGRAARNVNGVAILYADKITDSMKAAIDETERRREKQIKFNEEQGIVPQQIKKQVKDIIDGVYHEEDGSKGRLKGKNKVKVGEIHNEEDAIKEIAKLEKAMQQAARDLQFEEAAVLRDRIRDIKENLLFGAE

SEQ ID NO: 1880 - protein, 494 aa, Neisseria
MSKPVFKKIALYTLGAISGVAVSLAVQGFAAEKDRRDNEVLPVQSIRTMAEVYGQIKANYYQDKPDADLFEGAMKGMVAGLDPHSEYMDKKGYAEIKESTSGEFGGLGMEIGQEDGFVKVVSPIEDTPAERAGVKSGDFIVKIDNVSTRGMTVSEAVKKMRGKPGTKITLTLSRKNADKPIVVNLTRAIIKVKSVRHHLIEPDYGYIRVSQFQERTVESVNTAAKELVKENKGKPLKGLVLDLRDDPGGLLTGAVGVSAAFLPSEAVVVSTKGRDGKDRMVLKAIPEDYVYGMGGDSLAGIPAELKTIPMTVLVNSGSASASEIVAGALQDHKRAVIVGTQSFGKGSVQTLIPLSNGSAVKLTTALYYTPNDRSIQAQGIVPDVEVKDKERIFESREADLVGHIGNPLGGEDVNGETLAVPLEKDADKPAVKEKGKKKKDEDLSSRRIPNPAKDDQLRKALDLVKSPEQWQKSLGLAAKKPVSNKDKKDKKDKK

SEQ ID NO: 1881 - protein, 596 aa, Neisseria
MRYKPLLLALMLVFSTPAVAAHDAAHNRSAEVKKQTKNKKEQPEAAEGKKEKGKNGAVKDKKTGGKEAAKEGKESKKTAKNRKEAEKEATSRQSARKGREGDKKSKAEHKKAHGKPVSGSKEKNAKTQPENKQGKKEAKGQGNPRKGGKAEKDTVSANKKVRSDKNGKAVKQDKKYREEKNAKTDSDELKAAVAAATNDVENKKALLKQSEGMLLHVSNSLKQLQEERIRQERIRQARGNLASVNRKQREAWDKFQKLNTELNRLKTEVAATKAQISRFVSGNYKNSQPNAVALFLKNAEPGQKNRFLRYTRYVNASNREVVKDLEKQQKALAVQEQKINNELARLKKIQANVQSLLKKQGVTDAAEQTESRRQNAKIAKDARKLLEQKGNEQQLNKLLSNLEKKKAEHRIQDAEAKRKLAEARLAAAEKARKEAAQQKAEARRAEMSNLTAEDRNIQAPSVMGIGSADGFSRMQGRLKKPVDGVPTGLFGQNRSGGDIWKGVFYSTAPATVESIAPGTVSYADELDGYGKVVVVDHGENYISIYAGLSEISVGKGYMVAAGSKIGSSGSLPDGEEGLYLQIRYQGQVLNPSSWIR

SEQ ID NO: 1882 - protein, 78 aa, Neisseria
MPFAQSCAFFARILAIGSNSLILCVIFSMPQRILCSDTQGSTLSRIPYVARFWERAPLQTKQALPLSRKTGIQPIRKF

SEQ ID NO: 1883 - protein, 186 aa, Neisseria
MNRLLLLSAAVLLTACGSGETDKIGRASTVFNILGKNDRIEVEGFDDPDVQGVACYISYAKKGGLKEMVNLEEDASDASVSCVQTASSISFDETAVRKPKEVFKHGASFAFKSRQIVRYYDPKRKTFAYLVYSDKIIQGSPKNSLSAVSCFGGGIPQTDGVQADTSGNLLAGACMISNPIENLDKR

SEQ ID NO: 1884 - protein, 182 aa, Neisseria
MNLSNHFLIAMPDMEDAFFSQSVVYICKHDEDGALGIAINKPSPITMDMIFSATGKNIPMRMQHDSVMMGGPVQVERGYVVHTPIGNWQSSIGVSDNIALTSSRDVIENISREGAVDKALISIGYSSWSKGQLERELADNAWLTVPADEHILFDIPYEHRYAAAFAKLGIDPLALFSGAGHA

SEQ ID NO: 1885 - protein, 151 aa, Neisseria
MHKIPKGTALAFDFGEARIGVAQGDAELGLSHPLSTVTGGSNDEKFAAIAKLVQEWQPRYFVVGLPVHTDGTKHEMTHLSRKFGRRLNGRFNLPVYWVDERLSSVYAESLLSEAQVFGKKRKSVLDQVAAQAILHGFFEGGPAECFNGREG

SEQ ID NO: 1886 - protein, 218 aa, Neisseria
MASVFLEGEAVEVGNIFCIGRNYAAHIEELKNEIPSEPVVFMKPSGSILNSGGTILLPEFSRDVQFECELVLLVGKDSDGTGEGKDILGCVAGYGVGLDLTARDIQCRLKEKGLPWLKAKGFRHSACVSDFAAAGRIGNPEKVLFSLKQNGVLKQRGDTGLMIYPIREILHKLAADYGLGKGDLVFTGTPSGVGAIGAGDNLALELDGLVRASFTVGC

SEQ ID NO: 1887 - protein, 570 aa, Neisseria
MKASQFFISTLKEAPAEAALASHKLMIRAGLIKANASGLYTWMPMGLRVLRKVENVVREEMARAGSVELLMPVVQPAELWQESGRWEFYGKELLRLKDRHDRDFCMGPTCEEVIADIVRKEINSYKQLPKNFYHIQTKFRDEVRPRFGVMRAREFVMKDAYSFHADYASLQTTYQDMYDAYCRIFTRLGLAFRPVAADTGSIGGTGSHEFQVLAESGEDVIAYSDTSDYAANIELAPTLPLKGERAAAQAELVKVHTPNVKTIDSLVDFLSIPIEKTLKSIVVEGENEGELILLLLRGDHEFNDIKAEKLAGVKSPLTMASPAAIVEQFGANGGSLGPVGFAGKVYADFATEKGADWVIGANEDDYHYTGFNFGRDAAEPEFVDLRNVVEGDESPDGQGRLKLARGIEVGHVFQLRDKYTQAMNVSFLDNNGKSQIMEMGCYGIGITRVVAAAIEQNNDEKGIIWTKAMAPFEVVIVPMNYKKSDTVREAADKIYAELLAAGADVLLDDRDERAGVLLNDSELLGIPHRIVIGDRALKEGNVEYAERRDNEAQAVAIGEIVARVTASLNA

SEQ ID NO: 1888 - protein, 76 aa, Neisseria
MVICQQTRLLIGFRVEQIEHFFQVFPCFQNFYNFLKTLNLNYFFRFDLEIFVFAYYFSQTKIKGLATPSLPIKHST

SEQ ID NO: 1889 - protein, 887 aa, Neisseria
MSTQLHDVDPIETQEWLDALSSVLEYEGGERAQYLLENLVKYCRDKGVRMPHGTTTPYLNTVSVENEKGIPGDQNIEHRIRAFVRWNAAAIVLRAGKKDLELGGHIASFQSAATMYEVGFNHFWKAKGEGEEGDLVFFQGHVAPGIYARAFVEGRLTEDQLNNFRQEVDGHGLPSYPHPHLLPDFWQFPTVSMGLGPIMAIYQARFLKYLESRGLAKTKGRKVWCFCGDGEMDEPESQGAIALAAREGLDNLIFVINCNLQRLDGPVRGNGKIIQELEGNFAGAGWNVVKVIWGRRWDRLLAKDKDGILRQRMEECLDGDYQTYKSKDGAYVREHFFNTPELKALVADMTDEQLWALNRGGHDPQKVYNAYDRAANHADGKPTVILAKTIKGYGMGASGEGQNVAHQAKKMDKASLKQFRDRFDIPVTDEQIESGDLPYLTFAPDTEEYKYLHARRDALGGYLPQRKPTQEVLEVPELSAFDAQLKSSGEREFSTTMAFVRILSTLLKDKKIGKRVVPIVPDESRTFGMEGMFRQYGIWNPKGQQYTPQDKDQLMFYKESVDGQILQEGINEPGAMADWIAAATSYANSNFAMIPFYIYYSMFGFQRIGDLAWAAGDMHARGFLLGGTAGRTTLNGEGLQHEDGHSHIQADLIPNCVSYDPTFQYEVAVIVQDGLRRMYANNEDVFYYITLMNENYTHPDMPEGAEQDILKGMYLLKAGGKGDKKVQLMGSGTILQEVIAGAELLKADFGVEADIWSCPSFNLLHRDAVEVERFNRLHPLEAEKVPFVTSQLQGHDGPVIAATDYIRSYADRIRAYIPNDYHVLGTDGFGRSDSRANLRRFFEVDRYNVAVAALAALAEQGKVSKETVQQAIEKYGIKADSAPSWKR

SEQ ID NO: 1890 - protein, 535 aa, Neisseria
MSIVEIKVPDIGGHENVDIIAVEVKAGDTIAVDDTLITLETDKATMDVPADAAGVVKEVKVKVGDKISEGGVILTVETGAAAAEAAPAAAEAQPAPAAAPAAAGGATVQVAVPDIGGHTDVDVIAVEIKVGDTVAEDDTLITLETDKATMDVPCTAAGVVKAVFLKVGDKVSEGSAIIEVETVGSAAAAPAQAAQAAAPAAAPPPTAAAAPAAAPAPSAPAAAKIDEAAFAKAHAGPSARKLARELGVDLGQVKGTGLKGRIMGDDIKAFVKSVMQGGAAKPAAASASLGGGLDLLPWPKVDFSKFGNVEVKELSRIKKISGQNLSRNWVVIPHVTVHEEADMTELEEFRKQLNKEWEREGVKLSPLAFIIKASVSALKAFPEFNASLDGDNLVLKNYFNIGFAADTPNGLVVPVIKDVDQKGLKQISQELTELSKKAREGKLKPQEMQGACFTISSLGGIGGTGFTPIVNAPEVAILGVCKSQIKPVWNGKEFAPRLMCPLSLSFDHRVIDGAAGMRFTVFLAKLLKDFRRITL

SEQ ID NO: 1891 - protein, 145 aa, Neisseria; identical to SEQ ID NO: 596

SEQ ID NO: 1892 - protein, 594 aa, Neisseria
MALVELKVPDIGGHENVDIIAVEVNVGDTIAVDDTLITLETDKATMDVPAEVAGVVKEVKVKVGDKISEGGLIVVVEAEGTAAAPKAEAAAAPAQEAPKAAAPAPQAAQFGGSADAEYDVVVLGGGPGGYSAAFAAADEGLKVAIVERYKTLGGVCLNVGCIPSKALLHNAAVIDEVRHLAANGIKYPEPELDIDMLRAYKDGVVSRLTGGLAGMAKSRKVDVIQGDGQFLDPHHLEVSLTAGDAYEQAAPTGEKKIVAFKNCIIAAGSRVTKLPFIPEDPRIIDSSGALALKEVPGKLLIIGGGIIGLEMGTVYSTLGSRLDVVEMMDGLMQGADRDLVKVWQKQNEYRFDNIMVNTKTVAVEPKEDGVYVTFEGANAPKEPQRYDAVLVAAGRAPNGKLISAEKAGVAVTDRGFIEVDKQMRTNVPHIYAIGDIVGQPMLAHKAVHEGHVAAENCAGHKAYFDARVIPGVAYTSPEVAWVGETELSAKASGRKITKANFPWAASGRAIANGCDNGFTKLIFDAETGRIIGGGIVGPNGGDMIGEVCLAIEMGCDAADIGKTIHPHPTLGESIGMAAEVALGTCTDLPPQKKK

SEQ ID NO: 1893 - protein, 516 aa, Neisseria
MKKPLISVAAALLGVALGTPYYLGVKAEESLTQQQKILQETGFLTVESHQYERGWFTSMETTVIRLKPELLNNARKYLPDNLKTVLEQPVTLVNHITHGPFAGGFGTQAYIETEFKYAPETEKVLERFFGKQVPASLANTVYFNGSGKMEVSVPAFDYEELSGIRLHWEGLTGETVYQKGFKSYRNGYDAPLFKIKLADKGDAAFEKVHFDSETSDGINPLALGSSNLTLEKFSLEWKEGVDYNVKLNELVNLVTDLQIGAFINPNGSIAPSKIEVGKLAFSTKTGESGAFINSEGQFRFDTLVYGDEKYGPLDIHIAAEHLDASALTVLKRKFAQISAKKMTEEQIRNDLIAAVKGEASGLFTNNPVLDIKTFRFTLPSGKIDVGGKIMFKDMKKEDLNQLGLMLKKTEADIRMSIPQKMLEDLAVSQAGNIFSVNAEDEAEGRASLDDINETLRLMVDSTVQSMAREKYLTLNGDQIDTAISLKNNQLKLNGKTLQNEPEPDFDEGGMVSEPQQ

SEQ ID NO: 1894 - protein, 261 aa, Neisseria
MNPFLNTAFKAARRAGQMMIRAAGNLDAVKTDSKAFNDFVSDVDRNSEIILVEALKEAYPHHKITCEESGSHGKAAAEYEWIIDPLDGTTNFLHGHPQYAISMALLHKGVLQEALVYAPERNDVYMASRGKGALLNDRRIRVSNRIELNRCLIGTGFPVVDQSMMDKYLAILKDFLAKTAGGRREGAASLDLCAVATGRFDGFFEFNLKPWDIAAGALIVQEAGGIVTDMSGEDGWLESGDIVAANPKVLAQMLKIISAHV

SEQ ID NO: 1895 - protein, 271 aa, Neisseria
MTTLKPALPAYLDNIRIILTRTSHPANIGSAARAMKTMGLHKLTIVAPNLMATPMTENPPVFDPEHPQSFKLPEESFILASGAADVLENATIAASLDEALADTTIACALTSRRREITAPLQTPRDLVSELLQTANRGEKVALVFGNETFGLSIEEVQACNRLMTINGNPDYFSLNLAQAVQVVCYEIFSQTGSPMTHLQQEDHAATHEQIKGMVAHMESVMNDIGFFNRRNGERLMRRMQSLFGRANTQTEDIDILRGFFNTVSHRIHKKD

SEQ ID NO: 1896 - protein, 285 aa, Neisseria
MNYALDALWWKLTSQPVRDLASLLTAPPLWQSGCELSVRELLGEHGFRYLLALDADPTRLTDYLAQRAPFGHRLGIYAEELLAFWFANAPHAELLAHNLTVSGSDGNTQGAADFVARLNGKPYHIELTCKYYGGDTDSPEGMRGFDPKDTLLGKAAKLTAQLGLPHTSDGIRTLRQHGLPLNVKPVSIVRGIGFFPHGFHAFEPPLNPYGWRGIYIQDWAEYGFKRQEVRYHLLDRMAYLAPARVAETETLNATEIRRIDQGLIAVLECRPDGFWHEIERIMKAV

SEQ ID NO: 1897 - protein, 113 aa, Neisseria
MKNNVKNWTTKEVKQSLDKFNNILIKNTFLLQYLKKEFSASSAYCLSMLPEEEDIYEILVNGNIIIDLEFNKHTNETVVINVTDVDEYLKTLTNESGRVFFTLAKEIGKQKNI

SEQ ID NO: 1898 - protein, 418 aa, Neisseria
MNAAQLDHTAKVLAEMLTFKQPADAVLSAYFREHKKLGSQDRHEIAETAFAALRHYQKISTALRRPHAQPRKAALAALVLGRSTNISQIKDLLDEEETAFLGNLKARKTEFSDSLNTAAELPQWLVEQLKQHWREEEILAFGRSINQPAPLDIRVNTLKGKRDKVLPLLQAESADAEATPYSPWGIRLKNKIALNKHELFLDGTLEVQDEGSQLLALLVGAKRGEIIVDFCAGAGGKTLAVGAQMANKGRIYAFDIAEKRLANLKPRMTRAGLTNIHPERIGSEHDARIARLAGKADRVLVDAPCSGLGTLRRNPDLKYRQSAETVANLLEQQHSILDAASKLVKPQGRLVYATCSILPEENELQVERFLSEHPEFEPVNCAELLAGLKIDLDTGKYLRLNSARHQTDGFFAAVLQRK

SEQ ID NO: 1899 - protein, 144 aa, Neisseria
MNFALSVIMLTLASFLPVPPAGAAVFTWKDGGGNSYSDVPKQLHPDQSQILNLRTRQTKPAVKPAQADAGKRTDGAAQENNPDTAEKNRQLEEEKKRIAETERQNKEENCRISKMNLKAVGNSNAKNKDDLIRKYNNAVNKYCR

SEQ ID NO: 1900 - protein, 447 aa, Neisseria
MFHSVNVFTGETLYRRPAQDYAEFERRLADLKMRGGAFAQLGVTERAARLQKFADRLEAEKERFAEMVCEEVGRCLHECRAEIGKSIELIRYYARLAPELLAHKTIATQASLSQVRFEPLGVVFAVMPWNYPVWQVLRFAVPAMCAGNACAVKPAPSVARVSQALFDLASDGIPLAGVWLDEAGTLKAVEDTDAMAFTGSTHTGRILAAHAGANLKKTVLELGGSNAFIVMPDADLERAAAEACYSRFRDAGQSCNAAKRIIVTEAAADRFITLFLAECAKLKMGDPKHPDTTLAPLHREDLRDRVHGQVEDAVSNGAVCLTGGKIPQGRGWFYPATVLDRVNPACRVWREEVFGPAALILRAENEEHAIALANDSPFGLGACIYTADTERAWRFAEKIQAGSVFINRHTSSDLRLPFGGVKDSGYGRELSEFGLYEFVNVKTYWQK

SEQ ID NO: 1901 - protein, 217 aa, Neisseria
MGLGMEIGKLIVAFLVLINPFSALSLYLDLTNGHSTKERRKVARTAAVAVFAVIAVFALIGGTLLKVLGISVGSFQVGGGILVLLIAISMMNGNDNPAKQNLGAQPETGQARPARNAGAIAVVPIAIPITIGPGGISTVIIYASAAKTYGDIALIIAAGLVVSAICYAILIVAGKVSRLLGATGLTILNRIMGMMLAAVSVEIIVSGLKTIFPQLAG

SEQ ID NO: 1902 - protein, 96 aa, Neisseria
MALTLADVDKIARLSRLHLTAEEKEKSLQELNDIFTMVEQMQTINTDGIEPMAHPHEAALRLREDEVTETDRAAEYQAGAPEVRNRLYIVPQVIEE

SEQ ID NO: 1903 - protein, 481 aa, Neisseria
MTQYTLKQASVLLQSKQISAVELASAYLAAIAEKNPALNGYITIDQDKTLAEARAADERIAQGNASALTGVPVAYKDIFCQTGWRSACASKMLDNFISPYTATVVQNLLDEGMVTLGRTNMDEFAMGSTNENSFYGAAKNPWNLEHVPGGSSGGSAAVVAARLAPAALGSDTGGSIRQPASHCGITGIKPTYGTVSRFGMVAYASSFDQTGPMAQTAEDCAILLNAMAGFDPKDSTSLEREKEDYTRDLNQPLKGLKIGLPKEYFGEGNSADVLTALQNTIDLLKAQGAELIEVSLPQTKLSIPAYYVLASAEASTNLSRYDGVRYGHRAAQFADLEEMYGKTRAEGFGSEVKRRIMIGTYVLSHGYYDAYYLKAQKLRRLVADDFQTAFARCDLILAPTAPTAAPKIGADASPVETYLSDIYTIAVNLAGLPALTLPAGFSGGGLPVGVQLVGNYFAEAKILGAAHQIQLNSDWHGKRPE

SEQ ID NO: 1904 - protein, 310 aa, Neisseria
MKQNRTFTFPDFRTVYSYAPLYRLQHLKYTLRKFFGKKEIYAFEQFVNASPIRQGLFLHCPQNAYPLLREFVDRRFNCKRRLDAMTADFLMAEKLFGTDILHQMEDYRFHLVLAHLSDGISLWLNRNDNCVEEGAWSLSLRDEAGNRLYMATFAFVGTHLLTASVQGPAGEEAKDTVRRITKQLHGLRPQQLMVTALQYFAAVLGLDGAMGIAQKHQVKLRWKLKKRVKMNYDAFWQEYGASLERDGYWHLPQTPARKDLADIESKKRSMYRKRYEMLDNMVAEMKDSLKTEARGISDGIQTEKPPRRTA

SEQ ID NO: 1905 - protein, 476 aa, Neisseria
MTWETVIGLEIHVQLNTKSKIFSGASTAFGAEPNAHASVVECALPGVLPVMNREVVEKAIKLGLALDAKINQKNVFDRKNYFYPDLPKGYQISQLDLPIVEHGKLEIVVGDDVKTINVTRAHMEEDAGKSVHEGLNGATGIDLNRAGTPLLEVVSEPEMRSAAEAVAYAKALHSLVTWLDICDGNMAEGSFRVDANVSVRPKGQEEFGTRREIKNLNSFRFLEQAINYEAEAQIEILEDGGKVQQATMLFDPEKGETRVMRLKEDAHDYRYFPDPDLLPVIISDAQMQKAKAEMPELPKEMAARFVADYGVSEYDARLLTASRAQAAYFEEAAKESGQGKLTANWMNGELAAALNKEGMELADSPITAPRLAALVGKIADGTLSSKLAKKAFEAMWAEPEATIAEIIEKHGLQQMTDTGEIEAMVDEVLANNAKAVEQFKSGNEKALNAIVGQVMKASKGKANPAQVQELIKAKLA

SEQ ID NO: 1906 - protein, 336 aa, Neisseria
MNHTVTLPDQTTFAANDGETVLTAAARQNLNLPHSCKSGVCGQCKAELVSGDIQMGGHSEQALSEAEKAQGKILMCCTTAQSDININIPGYKADALPVRTLPARIESIIFKHDVALLKLALPKAPPFAFYAGQYIDLLLPGNVSRSYSIANLPDQEGILELHIRRHENGVCSEMIFGSEPKVKEKGIVRVKGPLGSFTLQEDSGKPVILLATGTGYAPIRSILLDLIRQGSNRAVHFYWGARHQDDLYALEEAQGLACRLKNACFTPVLSRPGEGWQGRNGHVQDIAAQDHPDLSEYEVFACGSPAMTEQTKNLFVQQHKLPENLFFSDAFTPSAS

SEQ ID NO: 1907 - protein, 210 aa, Neisseria
MDLHNIREDYSKRELSEADCADNPIEQFERWLDEAVRAQVNEPTAVNVAAVDGRGRPNSRMVLLKEVNSEGFVFFTNYHSRKGRSLDAHPFAAMTFFWPELERQVRVEGRVERLAEKLSDEYFESRPYQSRLGAWASAQSEVIPNKAVLVAKAAAVGLKHPLHVPRPPHWGGYIVIPDLLEFWQGRPSRLHDRIQYRLLDGGWIRERLSP

SEQ ID NO: 1908 - protein, 350 aa, Neisseria
MMSKQPTSKRQWRDGAAPSAKKTAKPFKSKARPKDETGKTASQPYGQKASDGIKPQNVPKQRAAKAKKLVVRNPNQKIMEHARDLKERRSDLSRMEPERLQKVLAASGVGSRREMEEWITNGWITVNGKTAQLGDKVTPDDHVTVKGSIIKLKWADRLPRIILYYKQEGEIVSRDDPQGRVSIFDRLPQAASSRWVAIGRLDINTSGLLILTTSGELVQRFAHPSFEVEREYAVRVLGGLTGEQMRVLTEEGVMLEDGLAKVERIREQGGEGANKWYNVVIKEGRNREVRRIFESQGLTVSRLVRIGFGPIGLPNRLKRGQFYELNPAEVANIIKWADMLLPGERRRKKA

SEQ ID NO: 1909 - protein, 513 aa, Neisseria
MKFLDREASIAKPGFNRWLVPPAALAVHLAIGQIYAYSVFNAPLTKLIGITESAAGDWKLTTVGWIFSIALAMLGASAALFGTWMERVGPRKAIFAAACCFSLGFFVSAFGVRTHNLFLLYLGNGVIGGVGLGLGYIGPVSTLMKWFPDKPGMATGLAIMGFGGGAMLASPLSVSLMNTFSNAASVGVAETFAVLGLLYLALMMFGAFTIRVPADGWKPEGYTAPKTQNKLVSSNHVNVSQAMKTPQFWLLFWVLCLNVTAGIGVLGQASVMIQELFSETSIGRQAAVGAGAAAGFVSLLSLFNMGGRFLWSSVSDKIGRKNTYTIFFVLGSLLYFAVPSIGEGGSKALFIIGFCVIISMYGGGFAAIPAYLKDLFGTYQVGAIHGRILLAWSTAAVIGPVLVNYIRQSQIDSGIPAAQAYSVTMYIMACLLIIGLLCNLAVKSVHEKHHEKDIKTAAHSGNPDDETAISDAYLVGEKVSGGGISVWWRWALAVIPLAYGVVMVFVKALDLFS

SEQ ID NO: 1910 - protein, 451 aa, Neisseria
MSDFFHSDVLSVSELNAFAKSLLENHLAGLWIAGEVSNLTRAASGHYYFSLKDSRAQVRCAMFKGAAVRLAKPLKEGDHIEVSGKISIYEARGEFQITVNEVRLKGLGQLYEAYERLKAQLQAEGAFAAERKKPLPVRPQCIGIVTSLAAAALRDVVTTLKRRAPEIPVIVYPTPVQGAGSELQIAQAIKTASQRAECDVLIVCRGGGSIEDLWAFNEEPVVRAIESCTVPVVSGVGHETDFTLADFVADMRAPTPTGAAELVSPNRQESLHRLAQAQCRLKTVLEQRYFDASQKLDWLARQIRHPRQKLDEQRASIGKLAQTLSYSMTQNVRTHTARFERQTQALKHCRPDVSVCKKNIDRFQTALSHAFHQLLTHRRQSLTAQAALLEAVSPQHILERGFSVVKNTRGQVIRNADVLKQGQKLHIIFADGETDVRVSKEQGQQDLFDCI

SEQ ID NO: 1911 - protein, 273 aa, Neisseria
MMRIFSTGGKMDTQAVITHIARWLDEYAARANAKGFVVGVSGGIDSAVVSALAARTGRPTLLLDMPIRQHPGQLERARLHIRNLQRQYANVSAQTVDLTDTFQTFEQTVGAHQTAFDSQPLSLANARSRLRMLTLYYYGQIHGLLVTGTGNKIEDFGVGFFTKYGDGGVDISPIADLTKTQVYRLAEALGVDEAIQKAPPTDGLWDTERTDEEQMGASYPELEWAMGVYGTRKPEDFEGRQREVLEIYTRLHRAMQHKINPIPVCRIPPELLG

SEQ ID NO: 1912 - protein, 157 aa, Neisseria
MTDFSVWETAPFGATVDHILQRYHNVHRAQFEELVPLAQKVAQVHADTFPAEIAELLAYMQNELLMHMMKEERMLFPMINQGVGRGAAMPIGVMMHEHEEHDRAIARLKELTDNFQPPEGACGSWTRLYALAKEMVEDLNDHIHLENDILFARVLDS

SEQ ID NO: 1913 - protein, 110 aa, Neisseria
MSSELIVHTSDAAFEKDVLNADIPVLLDFWAPWCGPCKMIAPILDDIAAEFEGRLKVVKINIDDNEATPSRFGVRGIPTLMVFKNGEVVATKVGALAKGQLTAFVEASIA

SEQ ID NO: 1914 - protein, 354 aa, Neisseria
MASYDKISDGWYRVCPKRSSNRALITVKLPFSTLFRLKPMTDITPFANRLGKNIKHLMKWAKRNGIEAWRIYDRDIPQFPFAADVYGDRIHLQEYDTGWLMRPEEYEAWLAEVLEAVAFVTGFAPEQIRLKRRERQKGLQQYEKTGKAGDDFVITENGRKFWVNLDKYLDTGLFLDHRNTRKKVGETAAGKRFLNLFSYTGSFTVYAATGGAASSETVDLSNTYLDWAKRNFELNGIDTERHKIVRADVFQYLQTAYGEGRRFDLIVMDPPSFSNSKKMSDILDIQRDHKKLIDGAVKLLASDGILYFSNNLRSFVLDDLVSEQYAVKDISKQSVPEDFRNKKIHRCWEIRHKS

SEQ ID NO: 1915 - protein, 462 aa, Neisseria
MSIKFADLNLDKNILSAVSSEGYESPTPIQAQAIPFALEGRDIMASAQTGSGKTAAFLLPTLQKLTKRSEKPGKGPRALVLTPTRELAAQVEKNALAYAKNMRWFRTVSIVGGASFGYQTRALSKPVDLIVATPGRLMDLMQSGKVDFERLEVLILDEADRMLDMGFIDDIETIVEATPSDRQTLLFSATWDGAVGKLARKLTKDPEIIEVERVDDQGKIEEQLLYCDDMRHKNRLLDHILRDANIDQCVIFTSTKAMTEVIADELYEKGFAANCLHGDMPQGWRNRTLMDLRKGRCKILVATDVAARGIDVPTITHVINYDLPKQAEDYVHRIGRTGRAGRTGIAITFAEVNEYVKVHKIEKYINRKLPELTIEGMEPTRKRKSAGGKPKGKGGWGDRKSGGWRGDHKPSKEGFGGKTRGEGFKKEGFKRDGFKKTGEGFKGKRKAGDSFAGKGERRYKDR

SEQ ID NO: 1916 - protein, 184 aa, Neisseria
MKKIIASALIATFALAACQDDTQARLEQQQKQIEALQQQLAQQADDTVYQLTPEAVKDTIPAEAQANGNNGQPVTGKDGQQYIYDQSTGSWLLQSLVGAAAGAFIGNALANKFTRAGNQDSPVARRARAAYHQSARPNARTSRDLNTRSLRAKQQAAQAQRYRPTTRPPANYRRPAMRGFGRRR

SEQ ID NO: 1917 - protein, 186 aa, Neisseria
MLPSHRSPDSATHDRIRKMTMNAMPQTAAQNETLHTCSIIVDDAQDFSPMLLDAGRDDTLISESMIPQIRTVAALIAAERHDFSRSSPAEFTDAADFFAARILVLGVRRFHLDVSLLQILKTANSRARRFAEKHRLFFTPAQAELSLNKHKNRRLLTVETEHEVENKGNPVANSLAFVRKLHTLPL

SEQ ID NO: 1918 - protein, 398 aa, Neisseria
MQNYLTPNFAFAPMIPERASGSRVWDTKGREYIDFSGGIAVNALGHCHPALVDALNAQMHKLWHISNIYTTRPAQELAQKLVANSFADKVFFCNSGSEANEAALKLARKYARDRFGGGKSEIVACINSFHGRTLFTVSVGGQPKYSKDYAPLPQGITHVPFNDIAALEAAVGEQTCAVIIEPIQGESGILPATAEYLQTARRLCDRHNALLILDEVQTGMGHTGRLFAYEHYGIVPDILSSAKALGCGFPIGAMLATEKIAAAFQPGTHGSTFGGNPMACAVGSRAFDIINTPETLNHVREQGQKLQTALLDLCRKTGLFSQVRGMGLLLGCVLDEAYRGRASEITAAALKHGVMILVAGADVLRFAPSLLLNDEDMAEGLRRLEHALTEFAATSDNP

SEQ ID NO: 1919 - protein, 414 aa, Neisseria
MSNENRTCSFCGKSKSHVKHLIEGENAFICDECVSNCIEILHEDGNDGTPSESAGGEPEESGKLPTPAEIVANLNDHVIGQEQAKKALAVSVYNHYKRLRHPKAGANVELSKSNILLIGPTGSGKTLLAQSLARKLDVPFVMADATTLTEAGYVGEDVEQIITKLLGKCDFDVEKAQRGIVYIDEIDKISRKSDNPSITRDVSGEGVQQALLKLIEGTVASVPPQGGRKHPNQEFINVDTTNILFICGGAFAGLEKVIRQRTEKGGIGFGASVHSKDENADITKLFGIVEPEDLIKFGLIPELIGRLPVIATLEELDEDALINILTEPKNALVKQYQALFGMENVELEFEEGALRSIARQAMERKTGARGLRSIVERCLLDTMYRLPDLKGLKKVVVGKAVIEEGREPELVFES

SEQ ID NO: 1920 - protein, 123 aa, Neisseria
MRKPQRGYARQDRVKEQIMRELAELVRTGLKDPRAGFITVNEVEVTRDYSHATVFYTILNQDAREITEEVLEHARGHLRSELAKRIKLFKTPELHFKYDESLERGLNLSALIDQVAAEKPVED

SEQ ID NO: 1921 - protein, 307 aa, Neisseria
MNTGKPQKRAVNGVLLLDKPEGLSSNTALQKARRLFHAEKAGHTGVLDPLATGLLPVCFGEATKFAQYLLDADKAYTATLKLGEASSTGDAEGEIIATARADISLAEFQTACQALTGNIRQVPPMFSALKHEGKPLYEYARKGIVIERKARYITVYAIDIAEFDAPKAVIDVRCSKGTYIRTLSEDIAKHIGTFAHLTALRRTETAGFTIAQSHTLEALANLNETERDSLLLPCDVLVSHFPQTVLNDYAVHMLHCGQRPRFEEDLPSDTPVRVYTENGRFVGLAEYQKEICRLKALRLMNTAASAA

SEQ ID NO: 1922 - protein, 390 aa, Neisseria
MKRDLSKMTCIEDLRRVAKRKMPRMFYDYIDSGSWTETTYRENTSDFKDIRFRQKVLVNMEGRSLETKMIGQDVKMPVAIAPTGFTGMAHADGEILAARAAEKFGIPFTLSTMSICSIEDVAENTSAPFWFQLYVMRDREFMENLIKRAKDAKCSALVLTADLQVLGQRHKDIKNGLSAPPKPTIANLINLATKPEWCMKMLNTERRTFRNIVGHAKNVGDLSSLSSWTSEQFDPRLSWDDVARIKDLWGGKLIIKGIMEPEDAEKAAKSGADALIVSNHGGRQLDDTVSAIKALPDIVSAVGSDIEVWMDSGIRSGQDILKAWALGAKGTMIGRAFLYGLGAYGEEGVTRALEILYKEMDISMAFTGHRDIQDVDASILRGKDWGRETV

SEQ ID NO: 1923 - protein, 148 aa, Neisseria
MRLTTKGRFAVTAMLDLAMNAQTGAVKLSAISERQNISLSYLEQLFGKLRRAGLVESLRGPGGGYILAAPAARINIAQIIAAAEDRLDATQCGSKANCHHGAPCLTHDLWENLNKTINDYLGSVTLQSIIEQKNNGDGSRVVQFTHIH

SEQ ID NO: 1924 - protein, 404 aa, Neisseria
MTVKTPVYLDYAATPPVDKRVAEKMIPYLTETFGNPASNSHSFGWEAEEAVEKARADIAALINADSKEIVFTSGATESNNLAIKGAAHFYKSKGNHLITVKTEHKAVLDTMRELERQGYEVTYLDVQENGLVDLDVLKAAIREDTILVSVMWVNNEIGVVQDIPAIGEICRERKIIFHVDAAQACGKVPVDVEAAKVDLLSMSGHKVYGPKGIGALYVRRKPRVRLEAQMHGGGHERGFRSGTLPTHQIVGMGEAFRIAKEELAQDTAHYLKLRDIFLKGIEGIEEVYINGDLEHRVPNNLNVSFNFVEGESLIMAVKELAVSSGSACTSASLEPSYVLRALGRNDELAHSSLRITFGRMTTEEEVQFAAELIKSKIGKLRELSPLWEMFKDGIDLNSIEWAAH

SEQ ID NO: 1925 - protein, 128 aa, Neisseria
MAYSDKVIDHYENPRNVGTFDKGDDSVGTGMVGAPACGDVMRLQIKVNDEGIIEDAKFKTYGCGSAIASSSLITEWVKGKSLDDALAIKNSEIAEELELPPVKIHCSILAEDAVKAAVADYRKRQENR

SEQ ID NO: 1926 - protein, 126 aa, Neisseria
MPSEPPAASGPSGAVQQGRNMITLTENAAKHINDYLAKRGKGLGVRLGVKTSGCSGMAYNLEFVDEADGDDLIFEGHGARIYIDPKSLVYLDGTQVDYTKEGLQEGFKFENPNVKDSCGCGESFHV

SEQ ID NO: 1927 - protein, 73 aa, Neisseria
MGGKVQHNKGKIRDNALKALVKSDLFRHKVERKRKGKGSYNRQEAKKWRDGFDTVPPFLCLKRGSFRRSRRSL

SEQ ID NO: 1928 - protein, 166 aa, Neisseria
MSQYFTLFRIEPAFDIDTENLEQTYRALAARFHPDKFASASAFEQKQAVMMSSTINDAYRTLKNPIDRAAYLLKTSGIDADAPEHTAFAPEFLMQQMEWRETLMEARAGNDLESLKNLDNEIRDEQEKLFCGLKQSFARQDYDTAAQQVRQGRFLDKLRNEISSAL

SEQ ID NO: 1929 - protein, 916 aa, Neisseria
MTDATIRHDHKFALETLPVSLEDEMRKSYLDYAMSVIVGRALPDVRDGLKPVHRRVLYAMHELKNNWNAAYKKSARIVGDVIGKYHPHGDTAVYDTIVRMAQNFAMRYVLIDGQGNFGSVDGLAAAAMRYTEIRMAKISHEMLADIEEETVNFGPNYDGSEHEPLVLPTRFPTLLVNGSSGIAVGMATNIPPHNLSDTVNACLRLLDAPDTEIDELIDIIQAPDFPTGATIYGLSGVREGYKTGRGRVVMRGKTHIEPIGRNGEREAIVIDEIPYQVNKAKLVEKIGDLVREKTLEGISELRDESDKSGMRVVIELKRNENAEVVLNQLYKLTPLQDSFGINMVVLVDGQPRLLNLKQILSEFLRHRREVVTRRTLFRLKKARHEGHIAEGKAVALSNIDEIIKLIKESPNAAEAKDKLLARPWRSSLVEEMLTRSGLDLEMMRPEGLAANIGLKEQGYYLSEIQADAILRMSLRNLTGLDQEEIVESYKNLMGKIIDFVDILSKPERITQIIRDELEEIKTNYGDERRSEINPFGGDIADEDLIPQREMVVTLTHGGYIKTQPTTDYQAQRRGGRGKQAAATKDEDFIETLFVANTHDYLMCFTNLGKCHWIKVYKLPEGGRNSRGRPINNVIQLEEGEKVSAILAVREFPEDQYVFFATAQGMVKKVQLSAFKNVRAQGIKAIALKEGDYLVGAAQTGGADDIMLFSNLGKAIRFNEYWEKSGNDEAEDADIETEISDGIEDETADSENALPSGKHGVRPSGRGSGGLRGMRLPADGKIVSLITFAPETEESGLQVLTATANGYGKRTPIADYSRKNKGGQGNIAINTGERNGDLVAATLVGETDDLMLITSGGVLIRTKVEQIRETGRAAAGVKLINLDEGETLVSLERVAEDESELSDASVISNVTEPEVEN

SEQ ID NO: 1930 - protein, 151 aa, Neisseria
MAYSADLRNKALNYSGLNLNQDKATKPQTVQIVRQGEATPYWFKFNPLYYEQCKNISQTAATFNLSRNTLYLWIRLKKQTGSLKHQVTGLNAVKSDRQKPAQYVGQHPDAYLHEIAKHFDCTAATICYALKQMGITRKKRPPLTKNKTRPK

SEQ ID NO: 1931 - protein, 183 aa, Neisseria
MPSERRPFQTAFLSNRKTVGKLAERVQSRYDGLHKFKHICSAAMALIKEPLDKVKQRNEELEAAEEAAAQEALGREQEAARVSEWEERYKLSRSEFEQFWKGLPQTVQNKLQASQKTWKSGMDKICANNAKAEGKTPNGIKFSELACKTAKTEARLEELHNRKKALIDEMAREADKKELSKRL

SEQ ID NO: 1932 - protein, 548 aa, Neisseria
MKHLHDLPAWSKLWNHFDDSKTLHMREMFEQDPQRAERYWLQVGGLTLDYSKNRINDETMSLLFELAREAGVPERMRQMFHGEKINTTENRAVLHVALRNRTNSPIVVDGEDVMPKVNRVLQRMGEFAHEVRSGSWLGYTNQVITDVVNIGIGGSDLGPLMMCTALKPFGHPRLNMHFVSNVDGSQLRDVLSKVHPETTLFIIASKTFTTQETLTNALTAREWFLNHAGDEEAVAKHFAAVSTNQKAVAEFGIDTANMFEFWDWVGGRYSLWSAIGLPIMLYLGEENFIEMLNGAHLMDQHFINTPLERNLPVILALIGIWYINYYGGGSHVIAPYDQHLHRLPKFIQQLDMESNGKQVTLDGKAVGHETSPIIWGETGINGQHAFFQLLHQGTHITPIDLIASLEKRSNLPGHHEILLANVFAQAEAFMRGKTPDEVRAELKAQGMDEVRIEELVPHKTFSGNRPTNLILMDKVNPRNMGSLIAMYEHKTFVQGIIWGINSFDQWGVELGKQLAKTILGELTGETGPQKHDSSTERLINLYLQTNRK

SEQ ID NO: 1933 - protein, 282 aa, Neisseria
MLSKISESLANLSGAERKVAECALAEPKWFVHAAVAEIAERASVSQPTVIRFCRSLGYKGLPEFKLALSASIGHEGMPYVHEELNADDDMASVVEKVLGNAAASLLGERRFLKESELENAIATLMHARRVEFYGVGNSGIVAQDAQHKFFRFGMSTVAYVDTHTQLMAASVLSDQDVLVAISNTGSSIELLDAVSIAKENGASVIALTRNDSPLAQLADCVLSVATQENAELYTPMVSRLLQLAVIDILAIGLALRLGDAASLQLQKSKKSIHNKHIDYDKD

SEQ ID NO: 1934 - protein, 328 aa, Neisseria
MSSTPNKQAGYPRLVADIGGTNARFALETAPRVIEKAAVLPCKDYDTVTDAVRAYLNQSGATAVRHAAFAIANPILGDWVQMTNHHWAFSIETTRQTLGLDTLILLNDFTAQALAVTQTSSKDLMQVGGQKPVEFAPKAVIGPGTGLGVSGLVHSHAGWVALAGEGGHTSFPPFDDMEVLIWQYAKNKYGHVSAERFLSGAGLSLVYEALAAKQKAKPAKLMPSEITEKALSGASPLCRQTLDIFCAMLGTVASNLALTLGARGGVYLCGGIIPRVLEYFKTSPFRSRFENKGRFEAYLAAIPVYVVLSEFPGISGAAAALDNHLRNV

SEQ ID NO: 1935 - protein, 231 aa, Neisseria
MFVWHEYENAAEAAQSLADAVADALQGALDEKGGAVLAVSGGRSPIAFFNALSQKDLDWKNVGITLADERIVPTVHADSNTGLVREYLLKNKAEAAMWIPMVEDGKTETELHPDAVVDYALKHYKQPDVLVLGMGNDGHTASIFPKAPQFQTAIDGSAGVALVHTTPVTAPHERVSMTLDAIAHTGHVFLAIRGEEKKAVFDQAAQGENREYPINLVLNHQGVNCHVFYAE

SEQ ID NO: 1936 - protein, 481 aa, Neisseria
MSTQTNFDLVLFGATGDLAMRKLLPCLYQAHVAGLLHPEGRILGVSRSELDTEGFLAKVETSSKIHVKENFSDEAWASFVERFAYLKVDVTQPDDFAALGDLVKARKETDNVVIYLSTAPKFFAQACENLAAIGLNADNVRVVLEKPLGTDLASSQQINTDVARYFKEGQIYRIDHYLGKESLQNLLALRFANVMFEPLWNNKYIESVQLTIAEQLGVEERGEFYDITGALRDMVQNHLMQMLCMTAMEAPASLDADAVRDEKVKVIKSLKPLTVESVNENVVRGQYTAARGMNGYLEEINVPQDSFTETYVAIKAEIENERWKGVPFYLRTGKRMAGKVAEIVLNFKDLNSHIFEGSRTAPNRLVIELQPYESVRLYTQMKTPGAGNKVETVPLATDLGKALEGRRAEAYERLLLDVINGKLALFNRRDELEAAWEYVMPILENWTNNTTPPHGYGAHSWGPEAARELLARDGHKWHEEQ

SEQ ID NO: 1937 - protein, 611 aa, Neisseria
MNTTPIHSKLAEITGRIIERSRPTREKYLAKIRSAKQMGRLERNQLGCSNLAHGYAAMPKSIKIEMLQETVPNLGIITAYNDMVSAHQPFKDFPDQIKDEAQKNGATAQVAGGTPAMCDGITQGYAGMELSLFSRDVIAMSTAIGLSHQMFDGSLFMGVCDKIVPGLMIGALSFGHIPGIFVPAGPMSSGIGNKEKARTRQLFAEGKVGRNELLKSEMGSYHSPGTCTFYGTANSNQMMMEMMGVHLPAAAFVHPYTDLREALTRYAAGHLARGIKNGTIKPLGEMLTEKSFINALIGLMATGGSTNHTMHLVAMARAAGVILNWDDFDEISSIIPLLIRVYPNGKADVNHFTAAGGLPFVIRELLNAGLLHDDVDTVVGHGMRHYTKEPFLIDGKLEWREAPETSGNDDILRKADNPFSPDGGLRLMKGNIGRGVIKVSAVREGCRIIEAPAIVFNDQREVLAAFERGELERDFVCVVRYQGPRANGMPELHKLTPPLGILQDRGFKVALLTDGRMSGASGKVPASIHMTPEALMGGNIAKIRTGDLIRFDSVSGELNVLINETEWNAREVESIDLGANQQGCGRELFANFRSMTSSAETGAMSFGGEFA

SEQ ID NO: 1938 - protein, 212 aa, Neisseria
MSKLTPREILTAGAVVPVMAIDDLSTAIDLSHALVEGGIPTLEITLRTPVGLDAIRLIAKEVPNAIVGAGTVTNPEQLKAVEDAGAVFAISPGLHESLAKAGHNSGIPLIPGVATPGEIQLALEHGIDTLKLFPAEVVGGKAMLKALYGPYADVRFCPTGGISLATAPEYLALPNVLCVGGSWLTPKEAVKNKDWDTITRLAKEAAALKPKA

SEQ ID NO: 1939 - protein, 346 aa, Neisseria
MKAMVYHGANDIRFEEKPRPQIIDPTDAVVKIVKTTICGTDLGIWKGKNPEVADGRILGHEGIGIVEEVGEAVKNIKVGDKVIISCVSKCCTCDNCKTQLYSHCRNGGWILGYMIDGTQAEYVRTPYADNSLVPLPDNVNEEIALLLSDALPTAHEIGVQYGDVKPGDTVFIAGAGPVGMSALLTAQLYSPAAIIVCDMDENRLKLAKELGATHTINPASGEVSKQVFAIVGEDGVDCAIEAVGIPATWNMCQDIVKPGGHIAVVGVHGQSVDFKLEKLWIKKLAITTGLVNANTTEMLMKAISSSSVDYTKMLTHHFKFSELEKAYDVFKHAAENQVMKVVLEAD

SEQ ID NO: 1940 - protein, 349 aa, Neisseria
MILMNTPIPFSERLIRWQKQHGRHHLPWQVKNPYCVWLSEIMLQQTQVATVLDYYPRFLEKFPTVQTLAAAPQDEVLSLWAGLGYYSRARNLHKAAQQVVRQFGGTFPSERKDLETLCGVGRSTAAAICAFSFNRRETILDGNVKRVLCRVFARDGNPQDKKFENSLWTLAESLLPSENADMPAYTQGLMDLGATVCKRTKPLCHQCPMADICEAKKQNRTAELPRKKTAAEVPTLPLYWLIVRNRDGAILLEKRPAKGIWGGLYCVPCFESLNGLSDFAAKFSLTMADMDEQTALTHRLTHRLLLITPFEAQMPSESPSDGIWIKPAHLKDYGLPKPLEIYLNGNRLE

SEQ ID NO: 1941 - protein, 60 aa, Neisseria
MNTNLNDKDKAMDTAIRFQKRMRIPKFFFLILGITMVLAFIQDVITGSNFLQITINVKFS

SEQ ID NO: 1942 - protein, 186 aa, Neisseria
MNMKTLLALAVSAVCSVGVAQAHEHNTIPKGASIEVKVQQLDPVNGNKDVGTVTITESNYGLVFTPDLQGLSEGLHGFHIHENPSCEPKEKEGKLTAGLGAGGHWDPKGAKQHGYPWQDDAHLGDLPALTVLHDGTATNPVLAPRLKHLDDVRGHSIMIHTGGDNHSDHPAPLGGGGPRMACGVIK

SEQ ID NO: 1943 - protein, 324 aa, Neisseria
MIAKHIDRFPLLKLDRVIDWQLIEQYLNRQKTRYLRDHRGRPAYPLLSMFKAVLLGQWHSLSDPELEHSLITRIDFNLFCRFDELSIPDYSTLCRYRNRLAQDNTLSELLELINRQLTEKGLKIEKASAAVVDATIIQTAGSKQRQAIEVDEEGQISGQTTPSKDSDARWIKKNGLYKLGYKQHTRTDAEGYIEKLHITPANAHECKHLSPLLEGLPKGTTVYADKGYDSAENRQHLEEHQLLDGIMRKAHRNRPLTEVQTKRNRYLSKTRYVVEQSFGTLHRKFRYARAAYFGLVKVSAQSHLKAMCLNLLKAANRLSAPAAA

SEQ ID NO: 1944 - protein, 742 aa, Neisseria
MRSAVLFIYFFLLNIFLFQPAVIHIQSNYILFMSIVSAPLPALSALIILAHYHGIAANPADIQHEFCTSAQSDLNETQWLLAAKSLGLKAKVVRQPIKRLAMATLPALVWCDDGNHFILAKTDGEGEHAQFLIQDLVTNKSAVLSFAEFSNRYSGKLILVASRASVLGSLAKFDFTWFIPAVIKYRRLFFEVLVVSVVLQLFALITPLFFQVVMDKVLVHRGFSTLDVVSVALLVVSLFEIVLGGLRTYLFAHTTSRIDVELGARLFRHLLSLPLSYFEHRRVGDTVARVRELEQIRNFLTGQALTSVLDLAFSFIFLAVMWYYSSTLTWVVLASLPAYAFWSAFISPILRTRLNDKFARNADNQSFLVESITAVGTVKAMAVEPQMTQRWDNQLAAYVASGFRVTKLAVVGQQGVQLIQKLVTVATLWIGARLVIESKLTVGQLIAFNMLSGQVAAPVIRLAQLWQDFQQVGISVARLGDILNAPTENASSHLALPDIRGEITFEHVDFRYKADGRLILQDLNLRIRAGEVLGIVGRSGSGKSTLTKLVQRLYVPEQGRVLVDGNDLALAAPAWLRRQVGVVLQENVLLNRSIRDNIALTDTGMPLERIIEAAKLAGAHEFIMELPEGYGTVVGEQGAGLSGGQRQRIAIARALITNPRILIFDEATSALDYESERAIMQNMQAICANRTVLIIAHRLSTVKTAHRIIAMDKGRIVEAGTQQELLAKPNGYYRYLYDLQNG

SEQ ID NO: 1945 - protein, 179 aa, Neisseria
MKITHCKLKKKVQKELLRFFVLEVTARSAADILGIHPNSAVLFYRKIRMVISHYLALAANEVFEGSVELDESYFGGRRKGKRGRGAAGKVVVFGILKRNGRVYTVVVDNAKSDTLMPVIKQKIMPDSIVYTDSLSSYDKLDVSGFIHYRINHSKEFADRQNHINGIENFWNQAKRVLRK

SEQ ID NO: 1946 - protein, 144 aa, Neisseria
MDNKKEFINNLTNRYMWIYPLVLNILFLPFYQSYQSFFIALGCLFALVRKMQSLDFKLQNHIVLLNIKSAWADKKVFLIRIVVSWLAVMEIWMCFISESSTWVCGAFCLNSEILEKIFRGFGYSGSLYFLFILMIDLNKLRESI

SEQ ID NO: 1947 - protein, 63 aa, Neisseria
MIGSGDTKQCKKFSACDGKYHVYDPLALDLDGDGIETVTAKGFSGSLKTERVNTMSIHSMPLN

SEQ ID NO: 1948 - protein, 242 aa, Neisseria; identical to SEQ ID NO: 487

SEQ ID NO: 1949 - protein, 400 aa, Neisseria
MSARSSALAEFGNMVANLVSAKNEKDISKRNEYYKQAGYSALLAFGNLASNIAPGSTSSHIVNGTNASVIASRLSGNISSAIQEHKDGKVNINRFQNILADLYSLGGLGSTLIEKNGNMQSWGIPLAIAGDIIAATAIATGDTGTISTEEFYNFDNWKGFGYELFEDWSRWVYDWLPDGWNLWKELDRNRSGQYHIYDPLALDLDGDGIETVAAKGFSGSLFDHNGNGIRTATGWVSADDGLLVRDLNGNGIIDNGAELFGDNTKLADGSFAKHGYAALAELDSNGDNIINAADAAFQSLRVWQDLNQDGISQANELRTLEELGIQSLDLAYKDVNKNLGNGNTLAQQGSYTKTDGTTAKMGDLLLAADNLHSRFTNKMLSISHVRENTISPFVLGCLNK

SEQ ID NO: 1950 - protein, 120 aa, Neisseria
MIAKSLFFRCQKIYFIYFILFICLYLNISYDGEIFIYFIINFTHLLICHGILLVFCRIFPYENIPFTIFLNFISLFLIFLPLIFTIRELIDSYYIESIINLFLILIPHVIFLIYLKGKQI

SEQ ID NO: 1951 - protein, 164 aa, Neisseria
MNDHIVQIIRRFGLGRIFFYSYSKSSIIIFSSYVVYYIIYNYQFNYLSLLIYLLPILCSIYMFIFFLGKTKDTLTTERRKKFFNSIFPLRILMIIGSEKKRLGIGSFYLLNLLWIIWCLMIHREQVPLNNLTLLLSFIFSLFFLLCDFVLLLNVYVYFFKLREA

SEQ ID NO: 1952 - protein, 142 aa, Neisseria
MSTDSTNYAAKHESLGKSVQRELQKTQSQLRQVVRKMQSKYNINNKARVAEISLLRQMQSQFSRKYVNKNLGNSNTLAQQGSYTKKDGTTAQAGDLLLAADNLHSRLTDKMLSISHVRENTISPFVLGCLKQITINAYHYLK

SEQ ID NO: 1953 - protein, 179 aa, Neisseria
MDFLEIFIMSAFRKILLIISCLLIASCSFVETIFYMAISPEPVVVDFPLGKKTKRSIELKQKIGKPYAISLGTNFIHYDPKQGERWIDDKLNYPYNISVKIFKVEEDGKKLIIDELLTERSRKLGGGVFGAGGKYSMHIYDFYLPEGEYLFEISDNSEYIPLYDEINNSIRIVVNARIQ

SEQ ID NO: 1954 - protein, 217 aa, Neisseria
MKITHCKLKKKVQKELLRFFVLEVTARSAADILGIHPNSAVLFYRKIRTVINHHLALAADEVFEGPVEPDESDFGGRRKGRRGRGAAGKVVVFGILKRNGRGYTVVVDNAKSETLLPVIKKKIMPDSIVYTDSLSSCDKLDVSGFIHYRINHSKEFADRQNHINGIENFWNQAKRVLRKYNGIDRKSFPLFLKECEFRFNFGTPSQQLKILRDWCGI

SEQ ID NO: 1955 - protein, 269 aa, Neisseria
MRPYATTIYQLFILFIGSVFTMTSCEPVNEKTDQKAVSAQQAKEQTSFNNPEPMTGFEHTVTFDFQGTKMVIPYGYLARYTQDNATKWLSDTPGQDAYSINLIEISVYYKKTDQGWVLEPYNQQNKAHFIQFLRDGLDSVDDIVIRKDACSLSTTMGERLLTYGVKKMPSAYPEYEAYEDKRHIPENPYFHEFYYIKKGENPAIITHRNYHRYGENDYSTSVGSCINGFTVRYYPFIREKQQLTQQELVGYHQQVEQLVQSFVNNPSKK

SEQ ID NO: 1956 - protein, 257 aa, Neisseria
MRPYATTIYQLFILFIGSVFTMTSCEPVNEQTSFNNPEPMTGFEHTVTFDFQGTKMVIPYGYLARYTQDNATKWLSDTPGQDAYSINLIEISVYYKKTDQGWVLEPYNQQNKAHFIQFLRDGLDSVDDIVIRKDACSLSTTMGERLLTYGVKKMPSAYPEYEAYEDKRHIPENPYFHEFYYIKKGENPAIITHWNNRVNQAEEDNYSTSVGSCINGFTVQYYPFIREKQQLTQQELVGYHQQVEQLVQSFVNNSSKK

SEQ ID NO: 1957 - protein, 1829 aa, Neisseria
MNEGEVVLTPEQIQTLRGYASRGDTYGGWRYLANLGDRYADDAAAIVGKDANLNGLNLWMKKGVENLWDDTVGKKTRLEKFDRVALQHFRQYARLINQNNGRLPNTSEIERSYYKAVTDNGVSSSAAIDLVINRSLPDMADGYWALGLGIEAERIHNEQAVNNPNGSERDNRKQLISALDKGFDGSFKEKHFTFLQSVMMDVTKLGVEYTIDGWQKIGGWGNGIINDLYKSVVKREWTGIFEIVNNNIKQGNEAFKNEINSLVHDMKAAGKEFGDDLNTQWNNLTQAAEIIYNDIVDNTSQGIEKGVKAIKELSEKMKNAASDLADGSAEKAKQVVEDLAQAAKEAYENAKSTAEKAAQAAREFFKGLPSFKDLAEKFRDLFPNPEGWIDDGHQCLAPWVKETKKRNGKYHVYDPLALDLDGDGIETVATKGFAGSLFDHTNNGIRTATGWVSADDGLLVRDLNGNGIIDNGAELFGDNTKLADGSFAKHGYAALAELDSNGDNIINAADAAFQTLRVWQDLNQDGISQANELRTLEELGIQSLDLAYKDVNKNLGNGNTLAQQGSYTKTDGTTAKMGDLLLAADNLHSRFKDKVELTAEQAKAANLAGIGRLRDLREAAALSGDLANMLKAYSAAETKEAQLALLDNLIHKWAETDSNWGKKSPMRLSTDWTQTANEGIALTPSQVAQLKKNALVSLSDKAKAAIDAARDRIAVLDAYTGQDSNTLYYMSEEDALNIVKVTNDTYDHLAKNIYQNLLFQTRLQPYLNQISFKMENDTFTLDFSGLVQAFNHVKETNPQKAFVDLAEMLAYGELRSWYEGRRLMTDYVEEAKKAGKFEDYQKVLGQETVALLAKTSGTQADDILQNVGFGHNKNVSLYGNDGNDTLIGGAGNDYLEGGSGSDTYVFGEGFGQDTVYNYDYATGRKDIIRFTDGITADMLTFTREGNHLLIKAKDGSGQVTVQSYFQNDGSGAYRIDEIHFDNGKVLDVATVKELVQQSTDGSDRLYAYQSGNTLNGGLGDDYLYGADGDDLLNGDAGNDSIYSGNGNDTLDGGEGNDALYGYNGNDALNGGEGNDHLNGEDGNDTLIGGAGNDYLEGGSGSDTYVFGKGFGQDTVYNYDYATGRKDIIRFTDGITADMLTFTREGNHLLIKAKDGSGQVTVQYYFQNDGSGAYRIDEIHFDNGKVLDVATVKELVQQSTDGSDRLYAYQSGNTLNGGLGDDYLYGADGDDLLNGDAGNDSIYSGNGNDTLDGGEGNDALYGYNGNDALNGGEGNDHLNGEDGNDTLIGGAGNDYLEGGSGSDTYVFGKGFGQDAVYNYDYATGRKDIIRFTDGITADMLTFTREGNHLLIKAKDGSGQVTVQSYFQNDGSGAYRIDEIHFDNGKVLDVATVKELVQQSTDGSDRLYAYQSGNTLNGGLGDDYLYGADGDDLLNGDAGNDSIYSGNGNDTLNGGEGNDALYGYNGNDALNGGEGNDHLNGEDGNDTLIGGAGNDYLEGGSGSDTYVFGKGFGQDAVYNYDYATGRKDIIRFTDGITADMLTFTREGNHLLIKAKDGSGQVTVQSYFQNDGSGAYRIDEIHFDNGKVLDVATVKELVQQSTDGSDRLYAYQSGSTLNGGLGDDYLYGADGDDLLNGDAGNDSIYSGNGNDTLDGGEGNDALYGYNGNDALNGGEGNDHLNGEDGNDTLIGGAGNDYLEGGSGSDTYVFGEGFGQDTVYNYHVDKNSDTMHFKGFKAADVHFIRSGSDLVLSASEQDNVRISGFFYGENHRVDTFVFDDAAISNPDFAKYINAGNNLVQSMSVFGSNTAATGGNVDANIQSVQQPLLVTPSA

SEQ ID NO: 1958 - protein, 867 aa, Neisseria
MSKTVHYLKDYQTPAYHILKTDLHFDINEPQTVVKSRLTVEPQRVGEPLVLDGSAKLLSVKINGAAADYVLEGETLTIAGVPSERFTVEVETEILPAENKSLMGLYASGGNLFTQCEPEGFRKITFYIDRPDVMSKFTTTIVADKKRYPVLLSNGNKIDGGEFSDGRHWVKWEDPFSKPSYLFALVAGDLAVTEDYFTTMSGRNVKIEFYTTEADKPKVGFAVESLKNAMKWDETRFGLEYDLDIFMVVAVGDFNMGAMENKGLNIFNTKFVLADSRTATDTDFEGIESVVGHEYFHNWTGNRVTCRDWFQLSLKEGLTVFRDQEFSGDRASRAVRRIENIRLLRQHQFPEDAGPTAHPVRPASYEEMNNFYTMTVYEKGAEVVRMYHTLLGEEGFQKGMKLYFQRHDGQAVTCDDFRAAMADANGINLDQFALWYSQAGTPVLEAEGRLKNNIFELTVKQTVPPTPDMTDKQPMMIPVKVGLLNRNGEAVAFDYQGKRATEAVLLLTEAEQTFLLEGVTEAVVPSLLRGFSAPVHLNYPYSDDDLLLLLAHDSDAFTRWEAAQTLYRRAVAANLATLSDGVELPKHEKLLAAVEKVISDDLLDNAFKALLLGVPSEAELWDGAENIDPLRYHQAREALLDTLAVHFLPKWHELNRQAAKQENQSYEYSPEAAGWRTLRNVCRAFVLRADPAHIETVAEKYGEMAQNMTHEWGILSAVNGNESDTRNRLLAQFADKFSDDALVMDKYFALVGSSRRSDTLQQVRTALQHPKFSLENPNKARSLIGSFSRNVPHFHAEDGSGYRFIADKVIEIDRFNPQVAARLVQAFNLCNKLEPHRKNLVKQALQRIRAQEGLSKDVGEIVGKILD

SEQ ID NO: 1959 - protein, 264 aa, Neisseria
MTTILAFDIETVPDVQGIRTLYELPSSLPDDEVVLFAQQKRRAQTGGDFMQHHLHQVVAISCCMRWGQDKVHVGTIGEMDDGEEVVIAKFFELIEKHTPQLVSWNGGGFDLPVLHYRSLIYGINAARYWDMGDGDFGDSRDFKWNNYISRYHQRHCDLMDLLALYQPRANVPLDDMAKLCGFPGKLGMDGSKVWEAFHTGRLKEIRNYCETDAANTYLMYLRFCLVSGRLDADEYEMEIKRMRNYLSAQAGEKPHWEEFVRAWE

SEQ ID NO: 1960 - protein, 289 aa, Neisseria
MKFIFFVLYVLQFLPFALLHKIADLTGLLAYLLVKPRRRIGEINLAKCFSEWSEEKRKTVLKQHFKHMAKLMLEYGLYWYAPAGRLKSLVRYRNKHYLDDALAAGEKVIILYPHFTAFEMAVYALNQDIPLISMYSHQKNKILDEQILKGRNRYHNVFLIGRTEGLRALVKQFRKSSAPFLYLPDQDFGRNDSVFVDFFGIQTATITGLSRIAALANAKVIPAIPVREADNTVTLHFYPAWKSFPGEDAKADAQRMNRFIEDRVREHPEQYFWLHKRFKTRPEGSPDFY

SEQ ID NO: 1961 - protein, 178 aa, Neisseria
MAASVRILGIDPGSRVTGFGVIDVRGRDHFYVASGCIKTPADAPLADRIAVIVRHIGEVVTVYKPQQAAVEQVFVNVNPASTLMLGQARGAALAALVSHKLPVSEYTALQVKQAVVGKGKAAKEQVQHMVVQMLGLSGTPQPDAADGLAVALTHALRNHGLAAKLNPSGMQVKRGRFQ

SEQ ID NO: 1962 - protein, 79 aa, Neisseria
MPHTLPDISQCIRQNLEQYFKDLNGTEPCGVYDMVLHQVEKPLLVCVMEQCGGNQSKASVMLGLNRNTLRKKLIQHGLL

SEQ ID NO: 1963 - protein, 336 aa, Neisseria
MHIGGYFIDNPIALAPMAGITDKPFRRLCRDFGAGWAVCEMLTSDPTLRNTRKTLHRSDFADEGGIVAVQIAGSDPQQMADAARYNVSLGAQLIDINMGCPAKKVCNVQAGSALMQNEPLVAAILEAVVRAAGVPVTLKTRLGWHDDHQNLPVIAKIAEDCGIAALAVHGRTRTQMYKGEARYELIAETKCRLNIPVWVNGDITSPQKAQAVLKQTAADGIMIGRGAQGRPWFFRDLKHYAEHGVLPPALSLAECAAAILNHIRAIHAFYGDTAGVRIARKHIGWYIDEMPDGEQTRREINRLDSAAAQYDMLAGYLERLAEKTDSWACAYRPNAF

SEQ ID NO: 1964 - protein, 457 aa, Neisseria
MSNPFSSLGLGTELVSALTAQGYENPTPIQAAAIPKALAGHDLLAAAQTGTGKTAAFMLPSLERLKRYATASTSPAMHPVRMLVLTPTRELADQIDQNVQGYIKNLPLRHTVLFGGMNMDKQTADLRAGCEIVVATVGRLLDHVKQKNIHLNKVEIVVLDEADRMLDMGFIDDIRKIMQMLPRQRQTLLFSATFSAPIRKLAQDFMNAPETVEVAAQNTTNANVEQHIIAVDTIQKRNLLERLIVDLHMNQVIVFCKTKQSVDRVTRELVRRNLSAQAIHGDRSQQSRLETLNAFKDGNLRVLVATDIAARGLDIAELPFVINYEMPAQPEDYVHRIGRTGRAGADGVAISLMDESEQKMFESIKELTGNKLLIERIEGFEPQWWEQGGAKPEKPEMREPRQRNRYESAKAQREKNTRPENAANDAGAACGKIAGRSRRSRREHRTCALLQPRYGVK

SEQ ID NO: 1965 - protein, 375 aa, Neisseria
MSNWKPNIPYNDLPPLPPKQDIESKTILKRCIAARASLARLKQAAELIPNQAMLINTLPVMEARASSEIENIVTTTDKLFQSLQMDTERQDPATKEALQYRTALFAGYESLTSRPLCTQTAIMVCNAIKHPYEMAIRKTGGTALKGGNSGNVVYTPPEGEETIRGKLANWERFIHESGDLDPLIIMAAAHYQFEAIHPFTDGNGRTGRILNSLLLIEKGLLDLPILYLSRYIIENRADYYRLLLGVTERQDWESWIIYILDGVADTADWTVSKIDAIRRLFEQTRQHIRTHAQGIYTHELVNLLFEQPYTRIANLEAAGIAKRQTASKYLKELSDIGVLQEIVIGRDKLFIHPRLMELLRGEGNSFTSFQSLVKA

SEQ ID NO: 1966 - protein, 342 aa, Neisseria
MARRSKTFEEAAAEVEERFGHRGIKLVEFEGTAKPCVINCPKHGNQTCSRYSNMFIGSSWGCPSCGNEQAAKAGIATLRKNHIALEMLKQAVTGMTKQERITTQAYNEMTKSVAGSNSIVLNDVQGDTTINNHHTHTHNHSDADGKALSMRLTPRPLLSDRQAAAFARTGKLTGSFDLFASVVAPSQYTFAVAMPDTSMSPVIEKGDLLVVEPRMCPADEDIALIELSDKRLVVAHLVIDIAGRMLIYQTGRPSEAFDLPEGSTILGVVLESKNGLCPPHRQEGVLIRITAPDVWTVGMISASKTSCTRPTAARKSAVCFLRFWQATRGIPKTRSWRNPNNA

SEQ ID NO: 1967 - protein, 503 aa, Neisseria
MSEQNHPQTEPQLDENQIIALRREKLHNIRQQRNAYPNDFKRDSFAADLHAQYGEIGKEELDPQGIPVKVAGRMMLKRQMGKASFATIQDVSGQIQLYLNNKGVSQEVLDDFNHWDLGDIVGAEGTLFKTNHGELTVRVSGIRLLSKSLRPLPDKHKGLSDQETKYRQRYVDLIANEESRNTFIKRSQIIQSVRNFMVGEHYLEVETPMMHPIPGGATAKPFVTHHNALDIPLYLRIAPELYLKRLVVGGLERVFEINRSFRNEGMSVRHNPEFTMIEFYEAFSDYERMMQMAEDIIRNASRTVNGTANITYNGKEVDLESPFERLTILEAIKKYNPHYTDEQLNDAEWLKKEIVKHGESLPPSPGIGSLQLALFEGCAEGKLWNPTFIVDYPVEVSPLARASDTKQGLTERFELFVVGRELANGYSELNDPEDQAERFKAQVVQKDAGDDEAMHYDADYIRAMEFGLPPTGGCGIGIDRLVMLLTDSQTIRDVILFPQMRPE

SEQ ID NO: 1968 - protein, 417 aa, Neisseria; identical to SEQ ID NO: 240

SEQ ID NO: 1969 - protein, 59 aa, Neisseria
MENIVKFEHEVLIVCVGRYLDYVTIRVFIKISLPGGILFLKTVGFGFVWGQSRPNWSNR

SEQ ID NO: 1970 - protein, 598 aa, Neisseria
MNTVSNYLSALREAMKAQGLDALVIPSADPHLSEYLPEHWQARRELSGFTGSVGTFVLTTDEAGVWVDSRYWEQAAKQLAGSGIVLQKSGQVPPYNEWLAASLPENAAVGIPSDMVSLTGKRTLAQSLAAKNIRIEHPDNLLNQVWTNRPALPAETVFIHDPDYVSETAAEKLARVRAVMAEKGADYHLVSSLDDIAWLTNLRGSDVPFNPVFVSFLLIGKDNAVLFTDRCRLNAEAAAALQTAGIAVEPYAQVADKLAQIGGVLLIEPNKTAVSTLVRLPESVRLIEGINPSTLFKSCKSEADIARIREAMEHDGAALCGFFAEFEDIIGNGGSLTEIDVDTMLYRHRSVRPGFISLSFDTIAGFNANGALPHYSATPESHSTISGNGLLLIDSGAQYKGGTTDITRVVPVGTPSAEQKSDNTLVLKAHIALAEAVFPENIPSPLIDAICRKPLWQAQCDYGHGTGHGVGYFLNVHEGPQRIAFAAPATPETAMKKGMVTSIEPGLYRPGKWGIRIENLAANQAVAAPQETEFGSFLCFETLTLCPIDTRLMDTALMTDGEIDWVNRYHAEVRRRLEPLTEGAAKAWLIKRTEPLAR

SEQ ID NO: 1971 - protein, 392 aa, Neisseria
MRKKLTALVLSALPLAAVADVSLYGEIKAGVEGRNYQLQLTEAQAANGGASGQVKVTKVTKAKSRIRTKISDFGSFIGFKGSEDLGDGLKAVWQLEQDVSVAGGGATQWGNRESFIGLAGEFGTLRAGRVANQFDDASQAIDPWDSNNDVASQLGIFKRHDDMPVSVRYDSPEFSGFSGSVQFVPIQNSKSAYTPAYYTKNTNNNLTLVPAVVGKPGSDVYYAGLNYKNGGFAGNYAFKYARHANVGRNAFELFLIGSGSDQAKGTDPLKNHQVHRLTGGYEEGGLNLALAAQLDLSENGDKTKNSTTEIAATASYRFGNAVPRISYAHGFDFIERGKKGENTSYDQIIAGVDYDFSKRTSAIVSGAWLKRNTGIGNYTQINAASVGLRHKF

SEQ ID NO: 1972 - protein, 158 aa, Neisseria
MQKIPLTVRGAELLKQELQQLKSVARPEVIEAIAEARSHGDLSENAEYEAAKERQGFIEGRISELEHKLSVAHIINPTEIHAEGKIVFGTTVTLEDLETEEHVIYQIVGEDEADIKQGKIYVGSPIARALIGKEEGDTAEVQAPGGVREYDIIEVRYI

SEQ ID NO: 1973 - protein, 83 aa, Neisseria
MKNLRLGIFGFKVRKCGFLCRKLIIFKFFVSKISLSAYFQLLLRTWRVCRRRGTIANFIEFGRIAAVQRQTSRRFSGRLVFLF

SEQ ID NO: 1974 - protein, 433 aa, Neisseria
MTESVRLPVARLKPSTVALPGSKSISNRTLLLAALSDNACEIHSLLKSDDTDRMLEALDKLGVQIEYLAEDRLKVHGTGGRFPNRTADLFLGNAGTAFRPLTAALAVLGGDYHLHGVPRMHERPIGDLVDALRIAGADVEYLGKEHYPPLHIGERQDNGERVIPIKGNVSSQFLTALLMALPLTGQAFEIRMVGELISKPYIDITLKLMAQFGVQVINEGYRVFKIPADAHYHAPEHLHVEGDASSASYFLAAGLIAATPVRVTGIGANSIQGDVAFARELEKIGADVVWGENFVEVSRPKERAVQSFDLDANHIPDAAMTLAIVALATGQTCTLRNIGSWRVKETDRIAAMANELRKLGAKVVEEAEAIHITPPETLTPDAVIDTYDDHRMAMCFSLVSLLGVPVVINDPKCTHKTFPTYFDVFSSLTETAE

SEQ ID NO: 1975 - protein, 177 aa, Neisseria
MFPPDKTLFLCLSALLLASCGTTSGKHRQPKPKQTVRQIQAVRISHIDRTQGSQELMLHSLGLIGTPYKWGGSSTATGFDCSGMIQFVYKNALNVKLPRTARDMAAASRKIPDSRLKAGDLVFFNTGGAHRYSHVGLYIGNGEFIHAPSSGKTIKTEKLSTPFYAKNYLGAHTFFTE

SEQ ID NO: 1976 - protein, 508 aa, Neisseria
MKTRSLISLLCLLLCSCSSWLPPLEERTESRHFNTSKPVRLDNILQIRHTPHTNGLSDIYLLNDPHEAFAARAALIESAEHSLDLQYYIWRNDISGRLLFNLVYLAAERGVRVRLLLDDNNTRGLDDLLLALDSHPNIEVRLFNPFVLRKWRALGYLTDFPRLNRRMHNKSFTADNRATILGGRNIGDEYFKVGEDTVFADLDILATGSVVGEVSHDFDRYWASHSAHNATRIIRSGDIGKGLQALGYNDETSRHALLRYRETVEQSPLYQKIQTGCIDWQSVRTRLISDDPAKGLDRDRRKPPIAGRLQDALKQPEKSVYLVSPYFVPTKSGTDALAKLVQDGIDVTVLTNSLQATDVAAVHSGYVKYRKPLLKAGIKLYELQPNHAVPATKDKGLTGSSVTSLHAKTFIVDGKRIFIGSFNLDPRSARLNTEMGVVIESPKIAEQMERTLADTTPAYAYRVTLDRHNRLQWHDPATRKTYPNEPEAKLWKRIAAKILSLLPIEGLL

SEQ ID NO: 1977 - protein, 468 aa, Neisseria
MEKNTLSARAPSPWLPLLLAIAIFMQMLDATILNTALPEIAADLNESPLDMQLAVISYTLTVALLIPLSGYLADRFGTKKVFFGSIAVFMLGSALCAASGSLFELTLSRVVQGIGGSMLVPIPRLTILRVYDKSKLLNAINYAVMPALIGPVLGPLAGGYLVEYASWHWIFLLNLPIGLLGFILGRNIMPDIKGSNISLDFKGYLIFSAAACLLLLSAESLSHALPPYFALLPLCGGLLFARRYFRHMKTASKPIYSADLFLIRTFRLGLAGNLFSRLGISSIPFLMPLMFQIAFGFGASLSGWLVAPVALSSLLVKPLIAPLMKRFGYRTVLLWNTKLLAAFIMLLALPDGNSPLWIWVFLSLAIGACNSLQFSAMNTLTLADLRPQQTGSGNSLMAVNQQLAISMGIVAGALILKNWTFLIPASSGLHSAFRMTLLSIGGITLASSLVFKRLHVSDGTNLTRNTPS

SEQ ID NO: 1978 - protein, 259 aa, Neisseria
MSATIPPKIIRYDSNPTDVYFFGTCVLDLFMPEAGMDAITLIEQQGIRVHFPMAQSCCGQPAYSSGHPTEAFDVAKAQLDLFPENWPIVVPSGSCGGMMKHHWPTLFKGSEYEERAVDCAGRIIEFTHFLLAIGFKPEDKGEPLKVAVHTSCAARREMNVHLSGWQLIDGMENVERIVHDHESECCGFGGTFSVKQADISGAMVTDKVAALKETGATEIISADCGCMMNIGGKIAKDEPDMPRPKHIASFLLERTGGKA

SEQ ID NO: 1979 - protein, 233 aa, Neisseria
MSARENILAKLKKADALPMEEPAVFDYYREMGVSWGSEVERLKHWAAAMRAVKTEIYWVTKSNWMQVFREAAEGKGLKNILLPLATEHGQIARAALADSNIEPIAFEREIDTWKTEFFTNIDAGFSGAQCGIARTGTLMLFSSPEEPRTLSLVPPVHFCLFDTSKMYNEFHNAVEGEKLVENGMPTNVFLISGPSKTADIQLTLAYGAHGPRDLVILAILPDHISPADLEENA

SEQ ID NO: 1980 - protein, 484 aa, Neisseria
MTTQTIKFHMKPETFKQNAAISLQDKPLRKSLRTAMDMLMTKRKAVLTDEEELQSLRDLCEHVRQRSLSKLPALLEQLEENLTKLGVKVHWAETPTEACQIIHDIITAKNGKLMVKGKSMVSEEIELNHYLEAKGIKAVESDLGEFIVQMAGEKPTHIVMPAIHKTKEQVSELFHQNLGTPLTDDVDQLTGFARKALRDIYSTADVGLSGVNFAVAETGTLCLVENEGNGRLSTTVPPVHIAITGIEKVVAKLSDIPPLYSLLPRSAIGQNITTYFNMITGPRRSEELDGPQEMHLVLLDNGRSQAYAEDQMRRTLQCIRCGACMNHCPVYTRIGGAAYGTTYPGPIGEIISPHLLGLDATRDLPTACTMCGACVEVCPVRIPITEQMQRLRVEAQRSPTETVPHPIRGQGASHTFGEQMAWRTFNGIFSGSKTYRAFGWAATKFRNLTPRKQLGWTQNRVPMKPAKKTLHELMAEKMRQKEQA

SEQ ID NO: 1981 - protein, 161 aa, Neisseria
MIQIGIIMGSNSDWPVMRQAAQFLEEFGVEYEARVVSAHRTPDLMFQYAETARARGIKAIIAGAGGAAHLPGMVAAKTTVPVLGVPVPSKYLRGEDSLLSIVQMPKGVPVATFAIGEAGAANAALFAVSMLANETPELAQKLADFRAKQEQAVLNMELEQI

SEQ ID NO: 1982 - protein, 237 aa, Neisseria
MKIKLPLFIIWLSVSASCASVSPVPAGSQTEMSTRENASDGIPYPVPTLQDRLDYLEGKIVRLSNEVETLNGKVKALEHAKTHSSGRAYVQKLDDRKLKEHYLNTEGGSASAHTVETAQNLYNQALKHYKSGKFSAAASLLKGADGGDGGSIAQRSMYLLLQSRARMGNCESVIEIGGRYANRFKDSPTAPEAMFKIGECQYRLQQKDIARATWRSLIQTYPGSPAAKRAAAAVRKR

SEQ ID NO: 1983 - protein, 222 aa, Neisseria
MTTHLSNVAPDLQNYLNAIGEPEHPVLTRLREKTGHHRMGKMAIAREQAAVLVWLAKLIRAEKYLEIGVFTGYSSTALALALPEHGRITACDINVTFTDTARQVWNEAGVAHKISLHLQPALLTLDDLIAQGEAGSYDLALIDADKPPTPQYFERCLKLVRQGGIIAIDNILLNGRVMREAASDAPPSVGILKDFNQNLPNDPRIVPITLPVGDGLTLLLKK

SEQ ID NO: 1984 - protein, 658 aa, Neisseria
MSRIAALPDHLVNQIAAGEVVERPANALKEIVENSIDAGATAIEVELAGGGIRLIRVSDNGGGIHPDDIELALHRHATSKIKTLNDLEHVASMGFRGEGLASIASVSRLTLTSRQNDSSHATQVKAEDGKLSSPTAAAHPVGTTIEAAELFFNTPARRKFLKSENTEYAHCATMLERLALAHPHIAFSLKRDGKQVFKLPAQSLHERIAAIVGEDFQTASLGIDSGNGALRLYGAIAKPTFAKGKTDKQYCFVNHRFVRDKVMLHAVKQAYRDVLHNALTPAFVLFLDLPPEAVDVNVHPTKTEIRFRDSQQVHQLVFHTLNKALADTRANLTESVGNAGEVLHDITGVVSTPMPSENDSENLFDSVSNYPTGNKSDTHNAFGSSGKTAPMPYQSAYAPQQRSLSLRESRAAMNTYAELYKKTDDIDLELSRFEQARFGNMPSETPAPQTDTPLSDGIPSQSELPPLGFAIAQLLGIYILAQAEDSLLLIDMHAAAERVNYEKMKRQRQENGNLQSQRLLIPVTFAASHEECAALADYAETLAGFGLELSDMGGNTLAVRAVPAMLGKADVVSLAKDVLNELAQVGSSQTIEEHENRILATMSCHGSIRAGRRLTLPEMNALLRDMENTPRSNQCNHGRPTWVKLTLKELDALFLRGQ

SEQ ID NO: 1985 - protein, 704 aa, Neisseria
MAYQVLARKWRPKTFADLVGQEHVVKALQNALDEGRLHHAYLLTGTRGVGKTTIARILAKSLNCENAQHGEPCGVCESCTQIDAGRYVDLLEIDAASNTGIDNIREVLENAQYAPTAGKYKVYIIDEVHMLSKSAFNAMLKTLEEPPEHVKFILATTDPHKVPVTVLSRCLQFVLRNMTAQQVADHLAHVLDSEKIAYEPAALQLLGRAAAGSMRDALSLLDQAIALGSGKVAENDVRQMIGAVDKQYLYELLTGIINQDGAALTAKAQEMAACAVGFDNALGELAILLQHLALIQAVPNALAHDDPDSDILHRLAQTISGEQIQLYYQIAVHGKRDLSLAPDEYAGFMMTLLRMLAFAPLAAASCDANAVIENTELKSPSAQTAEKETAAKKPQPRPEAETAQTPVQTASAAAMPSEGKTAEPVTNQENNDIPPWEDAPDETAAGTAQASAKSIQTASEAGTPPKNQVSKNEAADNETDAPLSEVPSENPIQATPNNEALETEAFAHEAPAKPFNGYSFPNDDYLVEDGAEIPPPDWEHAAPADAEEENNADESSNNEDHTPYAPPPEFSTENWAAIVRHFARKLGAAQMPAQHSAWTEYHPDTGLMVLAMTAEARATADKKRLDKIRDTLAQAYGLQLTLQTQDWRDEAGRETPAMQDKRVQAEDRQKAQALLEADPAAQKILQAFGAQWQPESLELAANRP

SEQ ID NO: 1986 - protein, 111 aa, Neisseria
MFGKAGLGGLMKQAQQMQENMKKAQAKLAETEIEGEAGNGLVKITMTCAHEVRKIDISPDLIQEAADDKEMLEDLILAALKSARGKAEETANKTMGAFTQGLPPGVGDFFR

SEQ ID NO: 1987 - protein, 348 aa, Neisseria
MSDDKSKALAAALAQIEKSFGKGAIMKMDGSQQEENLEVISTGSLGLDLALGVGGLPRGRIVEIFGPESSGKTTLCLEAVAQCQKNGGVCAFVDAEHAFDPVYARKLGVKVEELYLSQPDTGEQALEICDTLVRSGGIDMVVVDSVAALVPKAEIEGDMGDSHVGLQARLMSQALRKLTGHIKKTNTLVVFINQIRMKIGVMFGSPETTTGGNALKFYSSVRLDIRRTGSIKKGEEVLGNETRVKVIKNKVAPPFRQAEFDILYGEGISWEGELIDIGVKNDIINKSGAWYSYNGAKIGQGKDNVRVWLKENPEVANEIDAKIRALNGVEMHITEGTQDETDGERPEE

SEQ ID NO: 1988 - protein, 254 aa, Neisseria
MCSCLVVKNTVIGSGRTKIAVPLVARDAAELSAVLEQIKNMPFDIAEFRADFLECAGSIGEILHHTQTVRDALPDKPLLFTFRRHGEGGSFPCSDDYYFELLDALIESRLPDIIDIELFSGETAVRCAVANAQKNGIAALLCNHEFHRTPPQEEIVCRLKQMEDCGADICKIAVMPQSAEDVLTLLSATLKAKELAAKPIVTMSMGQTGAVSRLAGQVFGSSITFGSGTQNSAPGQIGVSALRATLDCLENGAD

SEQ ID NO: 1989 - protein, 671 aa, Neisseria
MMKLNPQQLEAVRYLGGPLLVLAGAGSGKTGVITQKIKHLIVNVGYLPHTVAAITFTNKAAAEMQERVAKMLPKPQTRGLTICTFHSLGMKILREEANHIGYKKNFSILDSTDSAKIIGELLGGTGKEAVFKAQHQISLWKNDLKTPEDVVQTASNIWEQQTARVYASYQETLQSYQAVDFDDLIRLPAVLLQQNSEVRNKWQRRLRYLLVDECQDTNTCQFTLMKLLTGAEGMFTAVGDDDQSIYAWRGANMENLRKMQENYPQMKVIKLEQNYRSTARILKIANKVIENNPKLFTKKLWSQLGEGEPVKVVACQNEQHEADWVVSQIVKQKLIGGDKTQYADFAVLYRGKHQARIFEEALRGARIPYQLSGGQSFFDKAEIKDVLSYVRLLANPNDDPAFLRAVTTPKRGIGDVTLGKLNTYAHEHECSLYEAAQNEEALATLNNTNRQHLQTFMDMFVSYLAKAETSEAGEFINSLLEEIDYENHLMQNEEGKAGEIKWRNVGDLVSWFARKGGEDGKNIIELAQTVALMTLLEGKDEEETDAVSLSTLHAAKGLEYPYVFLVGCEEGVLPHNDSIEEGNVEEERRLMYVGITRAKRQLTLTHCVKRKKQGTWQFPEPSRFIDEMPQEDLKILGRKGGEPIVSKEEGRRNLADIIGRLDNLKKSGAAD

SEQ ID NO: 1990 - protein, 318 aa, Neisseria
MSSRKIIHIDMDAFYASVELREQPHLKGRPVVVAWEGARSVICAASYEARQFGLHSAMSVATAKRLCPQAVYVPPHFDLYRQVSAQIHAVFRRYTDLIEPLSLDEAYLDVTRNFKNIPYAGDVAKEIRAAIFAETGLTASAGIAPNKFLAKIASDWRKPNGQFVLPPHKVMAFLETLPLGKIPGVGKVTLKKMQSLGMRTAGDLRRFERGELLNHFGRYGYRLYDLVRGTDERPVKAERERLQISTEITLPEDLPLEQAAGHLPHLAEDLWRQITRKNVEAQSVTLKLKTYDFRIITRTLTYSSVLPDCALCCRLRKC

SEQ ID NO: 1991 - protein, 259 aa, Neisseria
MAASPEAKFTEEKILWVKHHTPKLITFAISRPESYRFKAGQFSRLGFYEGEGFIWRAYSIVSAEYADTLEYFAVLIQDGPMSARFAKMQQGNTILLDKNATGFLLPERFPDGKDLVMLCTGSGIAPFLSILEQPEIRQRFDTVNLIHSVSFPEELIFNDRLAALTEHPLVGEYGHSFRFVPVTTRAANPSGLSGKRIPELLKNNSIEQALHTKFTPESTRFMICGNPEMVKDTFQTLLDMGYAMHRNRIPGQIMMENGF

SEQ ID NO: 1992 - protein, 470 aa, Neisseria
MLFEFKENKMIVASRWPLLEKVFLRFGMPVAVVDLESTGGNLYEDRVTEVALVKFEQGRVVRHEWLVNPQKPIPQFVAGLTGISDGMVADAPVFAEIAGELFSVLKGCVLVAHNSRFDYTFLKHEFHRAGIGFSSPALCSVQLSRCLYPQFYKHSLDSIIERLGIVVEDRHRAMADVSALCDYLEYSLSEHGVEAWIRQCFRLMNPKPLPAALPERLREQLYGLPDGMGVLACFDGGGKVNYIGTFERVYSEISALLDSGKAPFDWCNTEEVRFFPALGSLHAYKIKAELVGRYHSDCYVSAKNLLKTFTTVRFEKGSDGMLNAKTAALKNGVTDNPPTGLFANKKAARRALSSWAETYGLCPAAAGILPDGYAEDEPCPVYVSGRCDKACGRSDEQVLAFAHKLPVLDWGKMHEVEITETDPLTGEKVVLHGMGGALEMDDGLWYFDKDLPDAFKAKFKTDRKNIKEIG

SEQ ID NO: 1993 - protein, 379 aa, Neisseria
MQNIFDPLVIRGKSLTPIVQGGMGVGVSASGLSSAVARENGIGTIASVDLRHLHEDLLAESQINPSEEKYTSLNCTALDREIQKAKSASEGKGLIAVNVMKAVKDHAAYVRQACESGADAVVMGAGLPLDLPEMTEGYHKDVALLPILSESRGINIVLKRWMKKGILPDAIVVEHPAHAAGHLGASTVEGVNDAKFDFKRVIEETFEVFKSLGLESEKIPLILAGGMANFEKVKTALKNWGASAVQIGTAFAVTEEGDAHLNFKKTLAGAETEKVVEFMSVAGLPARGVRTKFLDSYIKRESKLQTNAKADPRRCTQGLNCLTSCGLRDGLSKAGQFCIDIQLAAAFRGEVDKGLFFRGKDRCPSAMPSAPSARRYNIC

SEQ ID NO: 1994 - protein, 163 aa, Neisseria
MAGPIFVVIASVAMFFVAQQHATDLVTDDYYKDGKHIDIQLHRDEEAVRRHIGVQVLISPDMNAAKVFVGGEFDGKQPLNLLLMHPTRKADDQTVALKPVGSAQNGRAEYEAVFKTLSPTNHWYVRVEDAAGVWRVENKWITSQGNAVDLTPMDKLFNNTESK

SEQ ID NO: 1995 - protein, 498 aa, Neisseria
MTTENQAGSPASGIGTSEQTKAAPKAKKTFDPRASVIQIHPEGERIHPKKAEGRFAKLRIAAVLATQFVFYVIPWFNWSGRQAVVFNIPERHFFIFGLSLGVGDLIYLALLLMICAFGLFWWTTIAGRLWCGYSCPQTVYTEIMLWIDNLVEGDRNKRLKLEKSPWNFTKIRIKATKYLLIFLVCAWTGITFAGWFVPIRQFVPDLFTGAAGGGAMFAAAFYGFMTFFFAHIMREKVCLHMCPYARFQSAMFDKDTLIVSYDAERGEPRGARKKTVNKEEAGLGDCINCAMCVQVCPVGIDIRNGLQYQCIGCAACIDACDEIMDKMGYPRGLIRYTTESALEHEYSEKDIKKRLLRPRVAGYGAVLALVIIAFLAGLSTRKMVEVDILKDRGVLVRENAKGWLENAYSLRIINKSEKEQLITASVKGFDEIALTGLPEGGIKVAPRETVTLPVQVSTIPEYADKGSHPIEFTFQYRESGAPDGKPVVLEEDATFIGE

SEQ ID NO: 1996 - protein, 39 aa, Neisseria
MYPPHTSGRRIKLYNSGNIFWEKRIFSKLETQRLKKQEK

SEQ ID NO: 1997 - protein, 65 aa, Neisseria
MLSRKGRTRGKAAAGDRRGRIFDLRAKPAIIPFEIKSYRLCAGLSIAFVYELAPSVLPIWGCRFF

SEQ ID NO: 1998 - protein, 659 aa, Neisseria
MSQLANAIRFLSADAVQKANSGHPGAPMGMAEMAETLWTKFLNHNPANPKFYNRDRFVLSNGHASMLLYSLLHLTGYNLSIEDLKNFRQLHSKTPGHPEYGYTDGVETTTGPLGQGIANAVGMALAEKILAAEFNKDGLNIVDHYTYVFMGDGCLMEGVSHEACSLAGTLGLGKLIVLYDDNNISIDGKVDGWFTENIPQRFESYGWHVVPNVNGHDTAAIQAAIEAARAETGKPSIICCKTLIGKGSANKEGSHKTHGAPLGADEIEATRKHLGWTYPAFEIPQEIYDAWNAKEQGAKLEADWNELFAQYQAKYPAEAAEFVRRMDKKLPDNFDEYVQAALKEVCAKAETIATRKASQNSIEILAKELPELVGGSADLTPSNLTDWSNSVSVTRDKGGNYIHYGVREFGMGAIMNGLVLHGGVKPFGATFLMFSEYERNALRMAALMKINPVFVFTHDSIGLGEDGPTHQPIEQTATLRLIPNMDVWRPCDTAESLVAWAEAVKAADHPSCLIFSRQNLKFQARSEQQLNDIKRGGYVISEAQGNAQAVIIATGSEVELALEAQKALAAQNIAVRVVSMPSTNVFDRQDAAYQAAVLPEGLPRIAVEAGHADGWYKYVGLNGAVVGINRFGESAPADLLFKAFGFTVDNVVDTVKSVL

SEQ ID NO: 1999 - protein, 462 aa, Neisseria
MSTRTEHDTMGNVEVPSEAYWGAQTQRSRNNFKIGGETLPQPLIYALALVKKAAAATNVSLGRIKPEQADLITQAADDVLSGKLDGQFPLVVWQTGSGTQSNMNMNEVLANRANEIAGTGLAAYQPVHPNDHVNHAQSTNDAFPTAIHVAAAIEINRHLIPAVKALRDTLDKKAQAFAPIVKIGRTHLQDATPLTLGQEFSGYVSQLDHGLGRLNDALKDLYELALGGTAVGTGLNSHPEYAEKAAAKLAELSGLPFVSAPNKFEALGGRDAAVAASGALKTLAASLNKIANDIRWLASGPRCGLGEIKIPENEPGSSIMPGKVNPTQCEAMTMVCCQVFGNDVTIGMAGASGNFELNVYMPVIAYNLLQSIHLLGDACNSFNEHCAIGIEPVPEKIDYFLHHSLMLVTALNRKIGYENAAKVAKTAYKNNKSLRETAVELGLLTGEEFDELVVPADMVHPR

SEQ ID NO: 2000 - protein, 307 aa, Neisseria
MENQRPLLGFALALLAAMTWGTLPIAVRQVLKFVDAPTLVWVRFTVAAAVLFVLLALGGRLPKRRDFSWCSFRLLLLGVAGISANFVLIAQGLHYISPTTTQVLWQISPFTMIVVGVLVFKDRMTAAQKIGLVLLLAGLLMFFNDKFGELSGLGAYAKGVLLCAAGSMAWVCYAVAQKLLSAQFGPQQILLLIYAASAAVFLPFAEPAHIGSLDGTLAWVCFAYCCLNTLIGYGSFGEALKHWEASKVSAVTTLLPVFTVIFSLLGHYVMPDTFAAPDMNGLGYAGALIVVGGAVTAAVGDRLFKRR

SEQ ID NO: 2001 - protein, 174 aa, Neisseria
MSLNKVILIGRLGRDPEVRYMPNGEAVCNFSVATSETWNDRNGQRVERTEWHNITMYRKLAEIAGQYLKKGGLVYLEGRIQSRKYQGKDGIERTAYDIVANEMKMLGGRNENSGGAPYEEGYGQSQEAYQRPAQQSRQPASDAPSHPQEAPAAPRRQPVPAAAPVEDIDDDIPF

SEQ ID NO: 2002 - protein, 461 aa, Neisseria
MMARDNRIQMFPHEWRASTTLSGVYALRMLGMFLVLPVLAVYAASLPGAEGNKTLVGLAMGIYGLTQALLQLPLGIASDKFGRKKTIYAGLVVFAAGSFLAAAADTLPMLVAARAIQGAGAVSAAVTALLADLTRDGVRTRAMAMIGLSIGLTFSVSLVVAPVIADAVGVRGLFMLTGILTVISIGVVAWMTPDPEVSKLHEDTQAQPSRIGEVLKNRRLLTLDFGIFALHAAQMALFTALPFAMTQLGLEKIQHWKVYLPSTITGLVVMVPLIIVGETRNKLKQVFVLGIVCIAAAQLGLLSGMRSVGLITAYLVVYFIGFNVLEASLPSMVSKIAPSDLKGTAMGVYNTMQSLGLFAGGAAGGLLFQKYGFSGVFAFCSILMLLWLVIAVLSPAPKPVKNLSYPVGGVWQGNQEGLYRALSELEGVEDIGFSFDGQTVYLKVLQKGFDQAAAEKIITGV

SEQ ID NO: 2003 - protein, 207 aa, Neisseria
MRKPTDTLPVNLQRRRLLCAAGALLLSPLAHAGAQREETLADDVASVMRSSVGSVNPPRLVFDNPKEGERWLSAMSARLARFVPEEEERRRLLVNIQYESSRAGLDTQIVLGLIEVESAFRQYAISGVGARGLMQVMPFWKNYIGKPAHNLFDIRTNLRYGCTILRHYRNLEKGNIVRALARFNGSLGSNKYPNAVLGAWRNRWQWR

SEQ ID NO: 2004 - protein, 163 aa, Neisseria
MKYRRFYRNGGTYFFTVVTNKRQKILTDDAVRLALRQAVMAVRERYPFEILAWVLMPDHLHTIWRLPDNDSAYSERWRQIKRHSQYLIGGNLRLWQKRFWEYTIRDEADFAWHFDYLHFNPVKHGYVGQISDWGFSTFHRYVKQGIYPHNWGGGNADFSIGYD

SEQ ID NO: 2005 - protein, 243 aa, Neisseria
MSREINAGRHHFLYGGISGGGVHYWDNKDFSEQSLRLSFGYKNRSVTRSFGIVPFVEQNLLGGSRYNFVGGFNADFSQRLSERWRLTLNAGNMWKHYQEDRTAARYDSHMPLAGATLMYSAPKDWLLYGGADWSHNITKEAEQASIRKGLRVGAVKTFDGGLGLRANLRYTRRMFDAPGTIVYRFPRKDHEYQANLSLWHDKISWKGFTPQLNFRYLKIDSNMKSFYTRKNMQIFMSVEKDFK

SEQ ID NO: 2006 - protein, 502 aa, Neisseria
MTTTPANVLASVDLGSNSFRLQICENNNGQLKVIDSFKQMVRFAAGLDEQKNLSAASQEQALDCLAKFGERLRGFRPEQVRAVATNTFRVAKNIADFLPKAEAALGFPIEIIAGREEARLIYTGVIHTLPPGGGKMLVIDIGGGSTEFVIGSTLNPDITESLPLGCVTYSLRFFQNKITAKDFQSAISAARNEIQRISKNMRREGWDFAVGTSGSAKSIRDVLAAEMPQEADITYKGMRALAERIIEAGSVKKAKFENLKPERIEVFAGGLAVMMAAFEEMKLDRMTVTEAALRDGVFYDLIGRGLNEDMRGQTVAEFQHRYHVSLNQAKRTAETAQTFMDSLCHAKNVTVQELALWQQYLGRAAALHEIGLDIAHTGYHKHSAYILENADMPGFSRKEQTILAQLVIGHRGDMKKMSGIIGTNEMLWYAVLSLRLAALFCRSRQDLSFPKNMQLRTDTESCGFILRIDREWLERHPLIADALEYESVQWQKINMPFKVEAV

SEQ ID NO: 2007 - protein, 107 aa, Neisseria
MKKLLIAAMMAAALAACSQEAKQEVKEAVQAVESDVKDTAASAAESAASAVEEAKDQVKDAAADAKASAEEAVTEAKEAVTEAAKDTLNKAADATQEAADKMKDAAK

SEQ ID NO: 2008 - protein, 27 aa, Neisseria
MGKISRLMEHGPIFKQNLNQQLKKDKT

SEQ ID NO: 2009 - protein, 181 aa, Neisseria; identical to SEQ ID NO: 214

SEQ ID NO: 2010 - protein, 336 aa, Neisseria
MSKKRVLTGVTTTGIPHLGNYVGAIRPAVRAAQNLDTESFLFLADYHGIIKCHEPEMIHQSTQAVAATWLACGLDPERTTFYRQSDTPEVMELNWILTCITAKGLMNRAHAYKAAVQANAENGQEDPDFGVEMGLFSYPILMTADILMFNANEVPVGRDQIQHVEMARDIAGRFNHRFRELFTLPEVKIDENVELLVGLDGRKMSKSYGNTIPLWENDKKTQKSVNKIITNMKEPGEPKQPDESPLFEIYKAFSTPSETVEFTKMLADGLAWGEAKKLLAAKINAELAEPRERYNELTADPSQIEEILQAGAAKARKEARELLDKVRDAVGIRPLK

SEQ ID NO: 2011 - protein, 859 aa, Neisseria
MRYDKLTAKFQQALAEAQSLALAADGSYLEAGFVLKALLDDQNSGAAALLAHAGVNVPQVKQRLQQHLNSLPKVSGQGGDILPSRELQAVLNLMDKAATKRSDAYIASELFLLALVQQNDATGKILKEAGATEQNINAAIDAVRGGQNVNDANAEDQRDALKKYTLDLTQRARDGKLDPVIGRDDEIRRAIQVLQRRTKNNPVLIGEPGVGKTAIVEGLAQRIVNGEVPESLRNKRLLVLDLAALIAGAKYRGEFEERLKGVLNDLAKDDGNTLIFIDEIHTLVGAGKTDGAMDAGNMLKPALARGELHCIGATTLDEYRQYIEKDAALERRFQKVLVGEPSVEDTIAILRGLQERYEIHHGIDITDPAIVAAAELSDRYITDRFLPDKAIDLIDEAASRVKMEKETKPEAMDKIDRRLIQLRMEKAHVEKEKDDASKKRLELIDEEINGLQKEYADLDEIWKAEKAISDGAANIKKQIDEVKIKIEQAKRQGDLALASKLMYEDLEHLEKQRAAAERADTDSTKPANKLLRNNVGAEEIAEVVSRMTGIPVSKMMEGERDKLLKMEEVLHRRVVGQDEAVRAVSDAIRRSRSGLADPNKPYGSFLFLGPTGVGKTELCKALAGFLFDSEDHLIRIDMSEYMEKHAVARLIGAPPGYVGYEEGGYLTEQVRRKPYSVILLDEVEKAHPDVFNILLQVLDDGRLTDGQGRTVDFKNTVIVMTSNIGSQHIQQMGIQDYEAVKEVVMEDVKEHFRPEMINRIDEVVVFHGLDQDNIRNIAKIQLKGLEKRLEKQNLRLAVSDAALDIIAKAGFDPIYGARPLKRAIQSEIENPLAKALLAGNYAPESEIRVEADGDRLKFA

SEQ ID NO: 2012 - protein, 404 aa, Neisseria
MDKFPKSAKLDHVCYDIRGPVHKKALQLEEEGNKILKLNIGNPAPFGFEAPDEILVDVIRNLPTSQGYCDSKGLYSARKAIVHYYQTKGLRDITVDDVYIGNGVSELITMSMQALLNDGDEILIPAPDYPLWTAAATLAGGTVRHYLCDEENGWFPNLADMEAKITPKTKAIVVINPNNPTGAVYSREILLEIAELARKHGLIIFADEIYDKILYDGAVHHHIAALAPDLLTVTFNGLSKAYRVAGFRQGWMVLNGPKHHAKGYIEGLDMLSSMRLCANTPMQHAIQTALGGYQSINEFILPGGRLLEQRNRAWELVNQIPGVSCVKPMGAMYMFPKIDTEMYRIRDDMKFVYDLLVREKVLLVQGTGFNWIKPDHFRIVTLPYVHQIEEAMGRLARFLQTYRQ

SEQ ID NO: 2013 - protein, 69 aa, Neisseria
MPYVNIKVTGGKEAPTAAQKAELIGGVTELLARVLGKNPETTVVVIDEVDTDNWGIGGKSVSERRKEGR

SEQ ID NO: 2014 - protein, 268 aa, Neisseria
MKKTLTLLAVSALFATSAHAHRVWVETAHTHGGEYLKADLGYGEFPELEPIAKDRLHIFSKPMQLVTEKGKENMIQRGTYNYQYRSNRPVKDGSYLVIAEYQPTFWSKNKAGWKQAGIKEMPDASYCEQTRMFGKNIVNVGHESADTAIITKPVGQNLEIVPLDNPANIHVGERFKVRVLFRGEPLPNATVTATFDGFDTSDRSKTHKTEAQAFSDSTDDKGEVDIIPLRQGFWKANVEHKTDFPDQSVCQKQANYSTLTFQIGHSHH

SEQ ID NO: 2015 - protein, 421 aa, Neisseria
MSEALAKETLNPFEIARKQVKTACDRLKTDPAVYEILKSPTRVLEVNFPVKLDDDTVKTFTGYRSQHNNAVGPYKGGVRFHPSVNLDEVKALSIWMTIKCCVAGIPYGGGKGGITLDPRDYSEAELERIARAYAEAIAPLIGEKIDIPAPDVNTNGKIMSWMVDAYENVVKHSAPGVFTGKPVEFGGSLARTEATGYGVNLAAVQALEKLGKDVKGATYAIQGFGNVGYHTGYYAHQSGAKVVAVSTVDVAIYNENGLDMEALFKEFQEKGFITNEAGYGKEITNAELLALDVDVLAPCALENQLTSENAGKVRAKIVVEGANGPTTPEADVILRQNGVLVVPDILANCGGVVVSYFEWVQNLQGYYWEFDEVQEKETVVLRRAFRDIWNLAQEYDVDLRTASYMMSIRRVEKAMKLRGWY

SEQ ID NO: 2016 - protein, 61 aa, Neisseria
MCSAFFRRIPCGLGNKIIYRLIKSGRFQLHAITFCLKIGYSCEPDGLFHSEPLFVKRKQNV

SEQ ID NO: 2017 - protein, 153 aa, Neisseria
MKPQKSLRARAMDILSRQELSRIGLKRKLAPHAESEEELENVLNEFAERNWQSDLRYAEAYIRSKSRKHGSLRLKQALAQQGIDEETSRNLLPDRSSEKLAAIAVLRKKFKHPAADLKEKQKQARFLAYRGFDADTVQTALKHAWDDGWEEDC

SEQ ID NO: 2018 - protein, 53 aa, Neisseria
MSEQSEKNHNPLLEDERKNPVYRMGQAVAGFMLVVWAGVLALVFFLVFRFWLS

SEQ ID NO: 2019 - protein, 44 aa, Neisseria
MPSETFRRHRQPISAGYPIIAFFSLNSTFPFPKIFPHPFQNTLS

SEQ ID NO: 2020 - protein, 160 aa, Neisseria
MTQQRQLPSHELIMSELMMPDTANFSGNVHGGELLLLLDQVAYSCASRYSGNYCVTLSVDKVLFKEPIHVGDLVTFYASVNYTGRTSMEIGIRVEAQNIRTGEIRHTNSCYFTMVAVKDGKPVPVPPLEILTDRQRCRYEKAKKRRDISLQASGDVSCGC

SEQ ID NO: 2021 - protein, 415 aa, Neisseria
MLKQTTLLAACTAVAALLGGCATQQPAPVIAGNSGMQDAPSSAVYNNPYGATPYSPAPAGDAPYVPPVQSAPVYTPPAYVPPSAPAVSGTYVPSYAPVDINAATHTIVRGDTVYNISKRYHISQDDFRAWNGMTDNTLSIGQIVKVKPAGYAAPKAAAVKSRPAVPAAAQPPVQSAPVDINAATHTIVRGDTVYNISKRYHISQDDFRAWNGMTDNMLSIGQIVKVKPAGYAAPKTAAVESRPAVPAAVQTPVKPAAQPPVQSAPQPAAPAAENKAVPAPAPQSPAASPSGTRSVGGIVWQRPTQGKVVADFGGNNKGVDIAGNAGQPVLAAADGKVVYAGSGLRGYGNLVIIQHNSSFLTAYGHNQKLLVGEGQQVKRGQQVALMGNTDASRTQLHFEVRQNGKPVNPNSYIAF

SEQ ID NO: 2022 - protein, 248 aa, Neisseria
MNVLISNDDGYLSEGIAVLARVTAEFANVRVVAPERDRSGVSNSLTLERPLQLKQAQNGFYYVNGTPTDCIHIGQSVFSDFQADFVFSGINRGANMGDDTLYSGTVAAATEAYLMGIPAVAFSLNDASGRYWATAEQALWTLLAHFFKNPPQSPILWNINIPAVAPEDVRGIKIARLGRRHHGQNVIPARNPRGEQIYWIGPVGEVSDREEGTDFGECGAGFITVTPLQIDLTAYPDMAETAAFWHAD

SEQ ID NO: 2023 - protein, 518 aa, Neisseria
MDFSWLAEPHTWIGFATLLVLEVVLGIDNLVFVAILANKVQPARRDRARIIGLGLAVVIRIIMLAFMAHIITLTEPLFQIGGLAVSGKDMIMLAGGIFLLYKATTELHERLEGHNRFTVADSQKKHAPFWGVVAQILILDAVFSIDSVITAVAMVDHIVVAMGAVVVAMAVMISASKLLTEFVDRHPTVVMLCLGFLLMIGFSLIAEAFHFHIPKGYLYAAIGFSILIELFNQISQRNSRKNDYIGSSWRKRTAENVLGMMGIRESVLADAGGESGDDAHFEENEKSMIRSVLTLAERPIMGVMIPRRDIERLDISQSREEQCAQLQNTPYSRLLVVGKAGVDEPLGYINKKDLLSQLLETGGLDIQTALRQPLVLPDSTTALGAIELFRQSSADYALVVDEFGAVLGMVTMKDLLETIAGEFPEEFEREEEPAVQGNPDESLTVEGALEYVELAPQLNLPQQEEDADFHTVAGLIMEELQTIPDVGDFADFHGWRFEVVEKEGQRIERVKITKLPEE

SEQ ID NO: 2024 - protein, 308 aa, Neisseria
MAFCHCPDKLLNYLNYFDRRYTHMQDPEQSSKPARRFLCVPSVQAAMMENGKTVPRWRFALKSAGWHLLISLSVAGLAALLVFKVWYPYPYAELTGGLSLYQLVVAVDIVCGPLLTLILASPKKKTKARMVDFSMVGIIQLAALVYGLHSVSLARPVVEAFEQDRMTIVTAAEVVVEDLHKAPEGLQSLSWFGIRRIALKEPEDADEKNKTLDLSLKGIEPSMRPDQWLPYSDKEAEEIRKHLKPLKVLADARKTTVADILKQAGLAEGEELYYLPFTSSRQKEWIVITDKEGNTKGYAPIDGFIITP

SEQ ID NO: 2025 - protein, 477 aa, Neisseria
MNEYSQLIKHPDISLPPVSDGIKVDNPATGETLAFVRKTDSDKLKNLIQKAAAAQKLWAAKTALERADVLWRWYFQIKENKEALARLMTMEQGKSLTEARGEIDYAASFVRWFAEEARRIDGDVLTSVKASQKLVVLKQPVGVTAAITPWNFPSAMIARKAAPALAVGCAMIVKPASLTPLSAYALASLAYEAGIPQDLLPVVSGSASEIGHEFATNPIIRKISFTGSTEVGAKIFADSAADIKKLSLELGGNAPFIVFDDADLDKAVEGALASKFRNSGQTCVCTNRVYAQSAIYDEFCRKLSEKAAALKLGNGLEDGVNQGPLIEEKAVEKVEQHIADALAKGASCLTGGKRSALGGTFFEPTVLSGVTAQMAVAREETFGPLCPVFRFETEAEVIEAANNTEYGLAAYLFTADTARQWRVGEALEYGMVGINTGLISNEAAPFGGVKRSGLGREGSKYGADEYLELKYLCMDVG

SEQ ID NO: 2026 - protein, 164 aa, Neisseria
MIFKQNQNYWAVFDANKETLIVQTCSGLGLTAIDHLYPPHILPLDTDNETLGTTVLQALANSRTFVYDSPEDQDFFDTEKIRQRYEDWVAKLCGNLGYKTRRALFKNMMSVDIWLHNGCLKISPSRHVKLEAWNAIDADDVILSLDNSPEEIGAGLKLALSHCR

SEQ ID NO: 2027 - protein, 120 aa, Neisseria
MMTADAGICRPFKTKPARTIFGRFPARTVCLCASAIWTAAKSRCGWTAGVPSSLPTLPHPANAIPPNTVCSETQPSGTRKAAKPFSALPMPTAIRSKLPAAPVKRGSLFEPPSRFFGRFF

SEQ ID NO: 2028 - protein, 29 aa, Neisseria
MKQCACRDLCLMPASNSAGMRAHKTLNAE

SEQ ID NO: 2029 - protein, 22 aa, Neisseria
MPERRETAEPSAGTGTNRSLND

SEQ ID NO: 2030 - protein, 693 aa, Neisseria
MKSLKTFLIWGIVVLVGLASFTTLALSRGEQVSAVWMVTAAISVYCIAYRFYSLYIANRVMRLDPDRLTPAERHNDGLDYVPTHKGVLFGHHFAAIAGAGPLVGPVLAAQMGYLPGTLWIIFGVVFAGAVQDMMVLFVSMRRDGKSLGDIVKQELGTVPGVIASIGILMIMVIIMAVLALIVVKALVHSPWGTFTIAATMPIALFMGIYTRYIRPGKIGEISIVGFILLMLAVIYGEDVAKSSIGHWFDLDGIQLTWAIMIYGFVASVLPVWLLLTPRDYLSTFLKIGTIAALALGIVIVNPALQMPAVTHFIDGSGPVFSGALFPFLFITIACGAVSGFHALISSGTTPKMLENETHVRMIGYGGMLMESFVAIMALAAAASLDPGVYFAMNSPAALIGTDANTAAEVITTKLQFPVDAATLLHTAKEVGENTILSRAGGAPTLAVGMAHIMSRLIPGEAMMAFWYHFALLFEALFILTAVDAGTRVARFMIQDLGSIFYKPFGNTDSIPANLIATFFAVALWGYFLYTGVTDPLGGINSLWPLFGIANQMLAGVALIMCAVVLIKMKRDRYVWVVLVPAVGVLFVTCYAGLQKLFHSDPRISFLAHAGKYSDALAKNEILAPAKDIGEMAQIIFNDKINAGLTILFLSVVVIVAAYGLRTALKARKVGWPTAKEIPAVYRDGKQPEAQSEA

SEQ ID NO: 2031 - protein, 64 aa, Neisseria
MKHKLASWWKTIKLTANLMAGVPDYENYVAQQRKHNPNAPVMTKLQFQDYCRKRRCGANGGRCC

SEQ ID NO: 2032 - protein, 64 aa, Neisseria
MNPSQYLFIDLNFDKIPDTRLCCFSIFQPTVNLKQPVHAMLQFLFLSADCFDKELKIHFMHLKI

SEQ ID NO: 2033 - protein, 186 aa, Neisseria
MKNLIAFNKPYGVICQFSPHEKHKSLKDFINLPGFYPAGRLDTDSEGLLLLTDDGRLQAQITDPKFKHPKTYWAQLEGVPDESRLESLRKGIDLGGFVTRPASIRILKHGEADSLWERIPPIRVRKTVPDFWIEITISEGKNRQVRRMTAKAGYPCLRLIRVASGRLKLFDLDLKPGEWAYAPFKP

SEQ ID NO: 2034 - protein, 921 aa, Neisseria
MRSSFRLKPICFYLMGVTLYHYSYAEDAGRAGSEAQIQVLEDVHVKAKRVPKDKKVFTDARAVSTRQDIFKSSENLDNIVRSIPGAFTQQDKSSGIVSLNIRGDSGFGRVNTMVDGITQTFYSTSTDAGRAGGSSQFGASVDSNFIAGLDVVKGSFSGSAGINSLAGSANLRTLGVDDVVQGNNTYGLLLKGLTGTNSTKGNAMAAIGARKWLESGASVGVLYGHSRRSVAQNYRVGGGGQHIGNFGAEYLERRKQRYFVQEGALKFNSDSGKWERDLQRQQWKYKPYKNYNNQELQKYIEEHDKSWRENLAPQYDITPIDPSSLKQQSAGNLFKLEYDGVFNKYTAQFRDLNTKIGSRKIINRNYQFNYGLSLNPYTNLNLTAAYNSGRQKYPKGSKFTGWGLLKDFETYNNAKILDLNNTATFRLPRETELQTTLGFNYFHNEYGKNRFPEELGLFFDGPDQDNGLYSYLGRFKGDKGLLPQKSTIVQPAGSQYFNTFYFDAALKKDIYRLNYSTNTVGYRFGGEYTGYYGSDDEFKRAFGENSPTYKKHCNRSCGIYEPVLKKYGKKRANNHSVSISADFGDYFMPFASYSRTHRMPNIQEMYFSQIGDSGVHTALKPERANTWQFGFNTYKKGLLKQDDTLGLKLVGYRSRIDNYIHNVYGKWWDLNGDIPSWVSSTGLAYTIQHRNFKDKVHKHGFELELNYDYGRFFTNLSYAYQKSTQPTNFSDASESPNNASKEDQLKQGYGLSRVSALPRDYGRLEVGTRWLGNKLTLGGAMRYFGKSIRATAEERYIDGTNGGNTSNFRQLGKRSIKQTETLARQPLIFDFYAAYEPKKNLIFRAEVKNLFDRRYIDPLDAGNDAATQRYYSSFDPKDKDEDVTCNADKTLCNGKYGGTSKSVLTNFARGRTFLMTMSYKF

SEQ ID NO: 2035 - protein, 405 aa, Neisseria
MALIVHKYGGTSVGSPERIKNVAKRVAKARAEGHDIVVVVSAMSGETNRLVALAHEMQEHPDPRELDVVLATGEQVTIGLLAMALKDIGVDAKSYTGWQVALKTDTAHTKARIESIDDEKMRADLTAGKVVIVAGFQGISSEGDISTLGRGGSDTSAVALAAALKADECQIYTDVDGVYTTDPRVVPEARRMDTVTFEEMIELASLGSKVLQIRSVEFAGKYKVRLRVLSSLQDGGNGTLITFEEDDNMERAAVTGIAFDKNQARINVRGVPDKPGVAYQILGAVADANIEVDMIIQNVGSEGTTDFSFTVPRGDYKQTLEILSERQDSIGAASIDGDDTVCKVSAVGLGMRSHVGVAAKIFRTLAEEGINIQMISTSEIKVSVLIDEKYMELATRVLHKAFNLG

SEQ ID NO: 2036 - protein, 242 aa, Neisseria
MPDYIRISRAADSLRDIKITPHFLPHTDGSCLIECGNTKVICTASIDENVPPFLRGKNQGWVTAEYGMLPASTASRMLREASAGKQSGRTQEIQRLIGRSLRAVVDMEKLGERQILIDCDVIQADGGTRTASITGAFVALQIAVGKLVSDGILSENPIREAVAAVSVGVVNGVPLLDLDYPEDSGCDSDVNIVMTASGKIIEIQGTAEDAPFSLDELGKLVALAQKGIGELLQHQQNALSAA

SEQ ID NO: 2037 - protein, 154 aa, Neisseria
MYKHLVVAVDGSETSINALKHAAELAGVNGARLTLVHVANPAEYMALAPEFLQHESYEAAAVAQGNEVLDAAERTAQELGVENTVKHLLVANKGAREMAQDLVDYADENGADLLVLGTHGRTGLMHLLMGSFAETVMRQSHLPLLIIRSKAEEA

SEQ ID NO: 2038 - protein, 258 aa, Neisseria
MSDNALTSSRRFGGIARLYGDSALAHFSQAHVCVVGVGGVGSWAVEALARTGIGRLTLIDLDNVAESNVNRQLHALTGDFGKAKVTALRERITQINPQCEVFEIEDFVTEDNLPEYFGKGFDFVIDAIDQVRVKAAMAAYFVERKQPFVLSGGAGGQKNPALIQTADLSRVTHDPLLANLRYTLRKRYGFSRDTKANMRVPCVYSTENIVPPQSREACSADAAPQGLSCAGYGASMLVTASFGLYCAQAAVEHIADKK

SEQ ID NO: 2039 - protein, 175 aa, Neisseria
MEFVNNLVIFSFLLLMLIPIFFVVYGIYHKIRYRKICILRTSFILLVVILCSMYYIYCRYLDQQKVAYYCIDEQCISIVHLYKDYGINSPTYARIYAGKILFRFQVRAKNYAELLMEDDISISKKILGNKFIIYGSLPVIYGNVDNIEVKEATGYIDRSSTDYIVSRNLKFRHLY

SEQ ID NO: 2040 - protein, 69 aa, Neisseria
MPSEHLPDHIIRECRQIVFFCKLILKSTYRFTPCRPSLPHLHHPSTLSHGYSANPLPICPRICLFRPMH

SEQ ID NO: 2041 - protein, 284 aa, Neisseria
MPPIPAPSAPSEHTVAWVFGQPVTDLPQDLFIPPDALKVVLGSFQGPLDLLLYLIRKQNIDVLDIPMVKITEQYLHYIAQIETYQFDLAAEYLLMAAMLIEIKSRLLLPRTETVEDEEADPRAELVRRLLAYEQMKLAAQGLDALPRAGRDFAWAYLPLEIAVEAKLPEVYITDLTQAWLGILSRAKHTRSHEVIKETISVRAQMTAILRRLNGHGICRFHDLFNPKQGAAYVVVNFIALLELAKEGLVRIVQEDGFGEIRISLNHEGAHSDGISGTRGGRDVF

SEQ ID NO: 2042 - protein, 402 aa, Neisseria
MTGIIHSLLDTDLYKFTMLQVVLHQFPQTHSLYEFRCRNASTVYPLADIREDLEAELDALCQLRFTHDELGYLRSLRFIKSDFVDYLELFQLQRRFVEIGTDDKDRLNIRIEGPMIQAMFFEIFILAIVNELYFRRLETPAVIEEGERRLQAKAARLKEIAAAQNPDEPPFLISDFGTRRRYKLAWQEHVIRTLLEAAPGIVRGTSNVFLAKKLGITPIGTMAHEFLQAFQALDVRLRNFQKAALESWVHEYRGDLGVALTDVVGMDAFLRDFDLYFAKLFDGLRHDSGDPYVWGDKAYAHYQKLKIDSRTKMLTFSDGLDIERSWALHQYFKDRFKTGFGIGTNLTNDMGHTPLNIVLKLVECNGQSVAKLSDSPGKTMTNNSTFLAYLRQVFDVPEPETP

SEQ ID NO: 2043 - protein, 572 aa, Neisseria
MNLHQTVEHEAAAAFAAAGIADSPIVLQPTKNAEHGDFQINGVMGAAKKAKQNPRELAQKVAEALADNAVIESAEVAGPGFINLRLRPEFLAQNIQTALNDARFGVAKTDKPQTVVIDYSSPNLAKEMHVGHLRSSIIGDSISRVLAFMGNTVIRQNHVGDWGTQFGMLVAYLVEQQKDNAAFELADLEQFYRAAKVRFDEDPAFADTAREYVVKLQGGDETVLALWKQFVDISLSHAQAVYDTLGLKLRPEDVAGESKYNDDLQPVVDDLVQKGLAVEDDGAKVVFLDEFKNKEGEPAAFIVQKQGGGFLYASTDLACLRYRIGRLKADRLLYVVDHRQALHFEQLFTTSRKAGYLPENVGAAFIGFGTMMGKDGKPFKTRSGDTVKLVDLLTEAVERATALVKEKNPELGADEAAKIGKTVGIGAVKYADLSKNRTSDYVFDWDAMLSFEGNTAPYLQYAYTRVQSVFRKAGEWDANAPTVLTEPLEKQLAAELLKFEDVLQSVADTAYPHYLAAYLYQIATLFSRFYEACPILKAEGASRNSRLQLAKLTGDTLKQGLDLLGIDVLDVM

SEQ ID NO: 2044 - protein, 119 aa, Neisseria
MRNKQTPSKQASKQASKQASKQKIITPFLPTHALSARRIPLFPPLKSAFSSGRVSARLFSLFSFPRHACAPPAALCCTFAPGRHRSAIRFSVLHTPVSERNADVSTHRTTHKAPPYVLP

SEQ ID NO: 2045 - protein, 485 aa, Neisseria
MSEWRSFNRKGNTMNIHTLLSKQWTLPPFLPKRLLLSLLILLAPNAVFWVLALLTATARPIVNLDYLPAALLIALPWRFVKIAGVLAFWLAVLFDGLMMVIQLFPFMDLIGAINLVPFILTAPAPYQIMTGLLLLYMLAMPFVLQKAAAKTDFRHIAVCAAVVAAAGYFTGHLSYYDRGRMANIFGANNFYYAKSQAMLYTVSQNADFITAGLVDPVFLPLGNQQRAATHLNEPKSQKILFIVAESWGLPANPELQNATFAKLLAQKDRFSVWESGSFPFIGATVEGEMRELCAYGGLRGFALRRAPDEKFARCLPNRLKQEGYATFAMHGAGSSLYDRFSWYPRAGFQEIKTAENLIGKKTCAIFGGVCDSELFGEVSAFFKKHDKGLFYWMTLTSHADYPESDIFNHRLKCTEYGLPAETDLCRNFSLHTQFFDQLADLIQRPEMKGTEVIIVGDHPPPVGNLNETFRYLKQGHVAWLNFKIK

SEQ ID NO: 2046 - protein, 248 aa, Neisseria; identical to SEQ ID NO: 419

SEQ ID NO: 2047 - protein, 233 aa, Neisseria
MFRRHRHLKNMQIKKIMKWLPVALSLLGALGYTGYGSEAVRTAVAVLDVLGAAGDAGSDAPARRRASAKSGHRYTGTVSKVYDGDTLHVIDGDGAKHKIRMAYIDAPEMKQAYGTRSRDNLRAAAEGRKVSVRVFDTDRYQREVAQVSVGKTDLNLMQVQDGAAWHYKSYAKEQQDKADFADYADAQIQAERERKGLWKAKNPQAPWAYRRAGRSGGGNKDWMDAVGEWLGIW

SEQ ID NO: 2048 - protein, 223 aa, Neisseria
MTTQDELKRIAAEKAVEFVPENEYIGIGTGSTINFFIEALGKSGKKIKGAVSTSKKSGELLAQYDIPVVSLNEVSGLAVYIDGADEVNHALQMIKGGGGAHLNEKIVASASEKFICIADESKYVSRLGKFPLPVEVVESARSLVSRKLLAMGGQPELRIGYTTFYGNQIVDVHGLNIDQPLTMEDEINKITGVLENGIFARDAADVLILGTEEGAKVIYPCQG

SEQ ID NO: 2049 - protein, 160 aa, Neisseria
MTNIRIGQGYDVHQLTEGRKLILGGVEIPFEKGLLGHSDADALLHAVTDALLGAAGLGDIGSHFPDTAAEFKDADSRVLLRAAYQSVQAQGWQAVNVDTTVIAQKPKLAPHIPQMRANIAADLGIDISCVNIKGKTNEKLGYLGRMEGIEAQAAVLLVRI

SEQ ID NO: 2050 - protein, 229 aa, Neisseria
MKRKNIALIPAAGIGARFGADKPKQYVEIGSKTVLEHTIGIFERHEAVDLTVVVVSPEDTFADKVQTAFPQVRVWKNGGQTRAETVRNGVAKLLETGLAAETDNILVHDAARCCLPSEALTRLIEQAGNAAEGGILAIPIADTLKCADGGNISATVERTSLWQAQTPQLFRAGLLHRALAAENLDGITDEASAVEKLGVRPLLIQGDVRNLKLTQPQDAYIVRLLLDAV

SEQ ID NO: 2051 - protein, 244 aa, Neisseria
MTTRQIILDTETTGLYADGGDRLVEFAGLEMVNRQMTDKNLHLYVHPERDMPEEAARVHGLTIQVLEGKNAPPFAEVGRQIADFLRGAELIIHNAKFDVGFLNMEFRRMGLPTVEELGCTVTDTLAMAREMFPGQKASLDALCNRFSVDRSKRVLHGALIDCELLGEVYLAMTRRQFDLMGAAAEEKMETKPVVHTETKRSGKLKVIRADENELAAHGQYLDGLGEACIWRKEAVPSENGGTDA

SEQ ID NO: 2052 - protein, 436 aa, Neisseria
MYAKKGGLGLVKSRRFAPLFATQFLGAFNDNVFKTALFVMIGFYGLGQNGFLPAGQMLNLGALLFILPYFLFSSLSGQLGNKFDKAVLARWVKVLEMIIMAVAAYGFYIRSAPLLLACLFCMGAQSTLFGPLKYAILPDYLDDKELMMGNSLIESGTFVAILFGQILGTAVAGVPPYIVGILVLLVAVGGTVGSLFMPSVPAKAADTQIEWNIVRGTKSLLRETVRHKPVFTAIIGISWFWFVGAVYTTQLPTFTQIHLGGNDNVFNLMLALFSIGIAAGSVLCAKFSRERLMLAWVTVGALGLTVCGLVLVWLTHGHRFEGLNGIFWFLSQGWAYPVMAVMTLIGFFGGFFSVPLYTWLQTASSETFRARAVAANNIVNGIFMVSAAVLSAVLLFLFDSISLLYLIVALGNIPLSVFLIKRERRFLGAAAIRKKP

SEQ ID NO: 2053 - protein, 62 aa, Neisseria
MMESMFILVPISIILAFVIGWFFWWSGKNGQFDDLEGPAHRILMDDDSTSKLIEKERENDVR

SEQ ID NO: 2054 - protein, 99 aa, Neisseria
MHYFSIHDQSGRHIGFFILLADDESEARPQSGRFAVKLEGGMENHVLSPFGQTEIPQYWRVVKDRIELFFDEAPVGTLRNEYLTVSGQTFVLNDLTGNM

SEQ ID NO: 2055 - protein, 398 aa, Neisseria
MSQKLILVLNCGSSSLKGAVLDNGSGEVLLSCLAEKLNLPDAYITFKVNGEKHKVDLSAHPDHTGAVEALMEELKAHGLDSRIGAIGHRVVSGGELYSESILVDDEVIAGIEKCIPLAPLHNPAHLLGLRAAQSIFKGLPNVVVFDTSFHQTMPEVAYKYAVPQELYEKYGLRRYGAHGTSYRFVADETARFLGKDKKDLRMVIAHLGNGASITAVANGESRDTSMGLTPLEGLVMGTRSGDIDPSVFGFLAENANMTIAQITEMLNKKSGLLGISGLSNDCRTIEEEAAKGHKGAKLALDMFIYRLAKYIGSMAVAAGGLDALVFTGGIGENSDIIRERVIGYLGFLGLNIDQEANLKARFGNAGVITTADSKAVAVVIPTNEELMIAHDTARLSGL

SEQ ID NO: 2056 - protein, 601 aa, Neisseria
MKKLICLFAVFLMLCGRAFALDANDLLPPEKAFVPELAVADDGVNVRFRIADGYYMYQAKIVGKTDPADLLGQPSFSKGEEKEDEFFGRQTVYHHEAQVAFPYAKAVGEPYKLVLTYQGCAEAGVCYPPVDTEFDIFGNGTYHPQTDEPASAKDRFLQPSSQNGSGALPPPKGDEGGDSRFKLSWDTLNANLLAFFLAGLGLSFTACMYPLLPIVSSIVVGDKKAGKARAFVLSVVYVQGLALTYTLVGIVAGLTGALLTVWLQQAWVVLAASALMVVLALSMFGLFNIQLPNAVQSYFQNQSSRLSGGKIVSVFIMGILSALIVGPCVAPPLAFALGYIGQTGDAVLGGLALYTLALGTGVPLIAIGTFGGHILPKAGDWMNAVKYAFGFILLAVAVYLATPHLPYYLVVALYTLLMLVPAFMLLVNGRRQKRRPKAVAFALGGILLIGGAWFGWQGANGKTTALHHFLTLNPPAEAGKSSEHGKMFADTAALKAAMDTALKEHPDKPVVLDFYADWCISCKEMAAYTLNQPEVHQAVDMERFFQIDVTANTPEHQALLKEYGLFGPPGVFVVRSDGSRSEPLLGFVKADKFIEWYEQNR

SEQ ID NO: 2057 - protein, 173 aa, Neisseria
MRVQSGLIFCTQADEFAQSGHVEIDIQTGAVALRRPQCFRQCLHHFVFGFQPAAFGAQGVVDCAYAVRLVYARLFLDGQMQRHMQEGVAFAVFGQPVGVQMVFDAFEITVVFGMGFDNAEGFLFQCAQLQRIEPLLPHAGEKAADIVGIDIVHGGFDKMFMEIGSDNGGFYIN

SEQ ID NO: 2058 - protein, 275 aa, Neisseria
MDGEGMSVGHYENFPVGSLILPRRLRKPVHAVYAFARTADDMADEGSMPSEARLAGLEGLQRELDVLASGGRSAHPLIARLDAEAVVPFGLDLQPFYDLLSAFSQDVVKTRYGNFGELADYCRRSANPVGRIMLALYGKTDAVCVAQSDGICTALQLVNFWQDVAVDWQKGRVYIPQDDLLKFGVSEEQIAAGRADAAFQRLMAYECRRAFRMLKAGSPLARELNGRIGLELRMIVLGAQLILQKLDACRYDVFAQRPVLDKKDWLIMLKKALWK

SEQ ID NO: 2059 - protein, 160 aa, Neisseria
MAIVKNSVVSLHYEMYDANNQLLDKTEEPIAYLHGGYDGIFPLVEEALHGKDAGDTVDVALSPDDAFGEQDPELVRIEDAGVFPVEVEVGMMFEADDPETGDVVVYRVTDVADGKAVVDGNHPLAGMKIRFKATVESVRDASDEEIAHGHVHGPHGHHHH

SEQ ID NO: 2060 - protein, 98 aa, Neisseria
MKKSLFAAALLSLVLAACGGEKAAEAPAAEAPAAEAPATEAPAAEAPAAEAPAAEAPAAEAAATEAPAAEAAATEAPAAEAAATEAPAAEAPAAEAAK

SEQ ID NO: 2061 - protein, 455 aa, Neisseria
MLDLHTEFSRLLPADEIAEPSPTLLKDQRNRFTSAPDIILQPLSVKSVQTIMRFCHQHRIPVTPQGGNTGLCGAAVSENGVLLNLSKLNRIRSINLSDNCITVEAGSVLQTVQQAAEASNRLFPLSLASEGSCQIGGNIACNAGGLNVLRYGTMRDLVIGLEVVLPNGELVSHLHPLHKNTTGYDLRHLFIGSEGTLGIITAATLKLFANPLDKATAWVGIPDIESAVRLLTETQAHFAERLCSFELIGRFAAELSSEFSKLPLPTHSEWHILLELTDSLPDSNLDDRLVEFLYKKGFTDSVLAQSEQERIHMWALRENISASQRKLGTSIKHDIAVPIGRVADFVRRCAKDLEQNFKGIQIVCFGHLGDGSLHYNTFLPEILSNEVYRYENDINSTVYRNVLACNGTIAAEHGIGIIKKQWLDKVRTPAEIALMKSIKQHLDPYNIMNPGKLLP

SEQ ID NO: 2062 - protein, 148 aa, Neisseria
MAIANNKKAFHDFFIEDRIEAGLVLEGWEVKAIRAARVQLKESYIYWKKDAFYLVGCHITALPTASTHIKPDAVRPRKLLLNQSEINKLIGKTERAGYTIVPLDLHFSRGKIKMEIGLAKGKKQHDKRQSMKEADWKREKQRLIKHTR

SEQ ID NO: 2063 - protein, 336 aa, Neisseria
MSIKILIISPSWIGDCVMTQPLFRRLKELHPGCTIDVFAPKWSMAVFERMPEVNEILENSFGHGALELKRRWRVGRDLGRRGYDQVIVLPGSLKSAIIALATGIGKRTGYVGESRYFLLNDIRRLDKERLPLMVDRYTALAHPSQEDFDGHSGFPEFSIDERRREISVETFGLDIGKPVLAFCPGAEFGPAKRWPTRHFAELGKHYLAAGWQVWLFGSQKDDEIAEEINRLSDGMCVNLCGKTDLSQAMDLLSLADTVVCNDSGLMHLAAALGRKVVAVYGSSSPTHTPPLSDRAKIVSLHLECSPCFKRECPLGHTDCLNRLYPEKIVQAVEEAV

SEQ ID NO: 2064 - protein, 269 aa, Neisseria
MAKIGDFAVKSMIGIRSKQMITLPSLNNLPSKWDEIRHWLESRVFECGVMPHPNLTECEAKQFERDFWDNIGCAPEEYVRIRRAIRLLEARYPDSLNELVCAAIATPLGEMLAVFGSRGLCLLEFVGQKHLEQEIAAVQKALRGRFVFREDERTQLLRQELDLYFKGRLKTFATPLEQIGTEFQKQAWDALLAIPYGETRSYKEQAQRLGNPKAVRAVAAANGQNKVSILIPCHRVIGSDGKLTGYAGGLNRKQFLLALEHGEVQTALF

SEQ ID NO: 2065 - protein, 271 aa, Neisseria
MTAYNESTYSSSKGIIYANPHPLRRTAGFFNRCLCRGRIHAAIRQPVRRRRLHAKPAFERALRLLLFRRQCFARAVVEKSARRDKSFVLTVYDKDAPTGLGWMHRVVADIPADVHRRNATSLQLSRCANIADRTGLDALGGRRHSRRCPPPQRGLAAIKPLRQHRRRPVRSHIGGNQFADLPHQVDAFVHGKTDAVMLQPRQHAAKRGLRSIVRHFFIRQYRSLIIKRRAHTPGIRQLYRIAHCLRRPVLCGEPFYGFLFESNPLRLIEAV

SEQ ID NO: 2066 - protein, 381 aa, Neisseria
MTETQSLELAKELISRPSVTPDDRDCQKLLAERLHKIGFAAEELHFGDTKNIWLRRGTKAPVVCFAGHTDVVPTGPVEKWDSPPFEPAERDGRLYGRGAADMKTSIACFVTACERFVAKHPNHQGSIALLITSDEEGDALDGTTKVVDVLKARDELIDYCIVGEPTAVDKLGDMIKNGRRGSLSGNLTVKGKQGHIAYPHLAINPVHTFAPALLELTQEVWDEGNEYFPPTSFQISNINGGTGATNVIPGELNVKFNFRFSTESTEAGLKQRVHAILDKHGVQYDLQWSCSGQPFLTQAGKLTDVARAAIAETCGIEAELSTTGGTSDGRFIKAIAQELIELGPSNATIHQINENVRLNDIPKLSAVYEGILARLLAGNAV

SEQ ID NO: 2067 - protein, 206 aa, Neisseria
MLTPKSCDLFNIPFFQFSQLKKYQPESIPQIKADYKENWQIWQQLIQQVAAELGAPFAPPHIERWCNGWQVRAHFFAYFKYEQYKNSAAILSILLNRRRLSVSLDWHCYKADVSPIALPDYNRWLDNFDTEKYASFDMWHGAESEYDDYRTVAQQNESDRKLQNDEDFFCIGKHIERDDLGRQDVAKWIAETVEDLLPLYEACHGK

SEQ ID NO: 2068 - protein, 169 aa, Neisseria
MNPFETKSVTFAEPIEMLYACHGKVRRFCGQVAMLSDYIAENGCNQIVLQTIRQIAQYFNVAAPLHHEDEEENFFPLLLQYAPQAQESVDELLRQHIGLHDNWAAVSAEFAKLEADNAYVPDEEAFKRFVAGYDVHLAIEEPLFDMGNTFIPKEKLTEIGEIMAARRRK

SEQ ID NO: 2069 - protein, 183 aa, Neisseria
MKAYLALISAAVIGLAACSQEPAAPAAEATPAAEAPASEAPAAEAAPADAAEAPAAGNCAATVESNDNMQFNTKDIQVSKACKEFTITLKHTGTQPKASMGHNLVIAKAEDMDGVFKDGVGAADTDYVKPDDARVVAHTKLIGGGEEASLTLDPAKLADGEYKFACTFPGHGALMNGKVTLVD

SEQ ID NO: 2070 - protein, 46 aa, Neisseria
MKFVAKCRSETSVCATRRNLFQGFVNGGCTLISVKPNIILSIGDLL

SEQ ID NO: 2071 - protein, 157 aa, Neisseria
MFTQIPVYILCAMPSNQVCQCLRQFGMPFFQLCRRRTETLQRSLTQMQGIGFRRFFRFRDQPDRNRAYRSIKPCQLRQYRRCNHFQARCRHIVCRQKDKPAVFDTCRLKMRVQVGRQQFFHGGIQPPPLSRLFQKSGKQRVPPAQLFQIHKTYTQKD

SEQ ID NO: 2072 - protein, 916 aa, Neisseria
MLTNIAKKIFGSRNDRLLKQYRKSVARINALEEQMQALSDADLQAKTAEFKQRLADGQTLDGILPEAFAVCREASRRTLGMRHFDVQLIGGMVLHDGKIAEMRTGEGKTLVATLAVYLNALAGKGVHVVTVNDYLASRDAGIMEPLYNFLGLTVGVIISDMQPFDRQNAYAADITYGTNNEFGFDYLRDNMVTDQYDKVQRELNFAVVDEVDSILIDEARTPLIISGQADDNIQLYQIMNTVPPHLVRQETEEGEGDYWVDEKAHQVILSEAGHEHAEQILTQMGLLAENDSLYSAANIALMHHLMAALRAHSLFHKDQHYVIQDGEIVIVDEFTGRLMSGRRWSEGLHQAVEAKEGVEIKRENQTLASITFQNYFRLYTKLSGMTGTADTEAFEFQSIYNLETVIIPTNRPVQRKDFNDQIFRSAEEKFEAVVKDIEECHKRGQPVLVGTTSIENSELVSKLLTQAGLPHNVLNAKEHEREALIVAQAGKVGAITVATNMAGRGTDIVLGGNLKHQTDAIRADETLSDEEKQAQIAALEDGWQAEHDKVMEAGGLHIIGTERHESRRIDNQLRGRSGRQGDPGSSRFYLSFEDPLLRLFALDRAAAILNRLAPERGVAIEHNLLTRQIEGAQRKVEGRNFDMRKQVLEYDDVANEQRKVIYSQRNEILTSKDISDLMQEIRSDVVSDLVDTYMPPDSMEEQWDIPTLENRLAAEFRLHEDIQSWLKADNAIDGQDIKERLIERIENEYAAKTELVGKQAMADFERNVMLQVIDNQWREHLAAMDYLRQGIHLRSYAQKNPKQEYKREAFTMFQDLWNGIKFHIASLLTSVQIEQNPVAVVEEQPIGNIQSIHSESPDMEELLGQSQTDLVTEAFNPDGTDFSPEALEARGQIVHRNDPCPCGSGLKYKQCHGKLA

SEQ ID NO: 2073 - protein, 590 aa, Neisseria
MIPSDFIDELLAKTDIVDIIDEQVPLKKGGANYMACCPFHKEKTPSFSVSPTKQFYHCFSCGAHGSAIGFVMEHQGLSFPEAVQFLADRVGMVVPKVHGQNDNPEVRAERKKKQQTLEETTAAAADFYAQQLKFNPAAKAYLDKRGLSAEVIAHYGLGYAPDGWQPLTQVFQPYPNTALVDTGMVIDNEGRHYDRFRHRIMFPIRNPRGQVIGFGGRVLDDSKPKYLNSPDTPLFDKGKNLYGLYEGRAAVKEAGRILVVEGYMDVVALAQFGVGYGVAALGTATTAEHVKILMRQADSIYFCFDGDSAGRKAAWRALENALPQLKDDKSLHFLFLPEEHDPDSYIRAYGKAQFEDALLNQSKPLSEYFWEHLSDGIHLNTQEGKAELVKTSSPLLAQITAPALAYLLKQRLSELVGIDPDNLAQLLGQEAPKRHVKQKNYKLPPISVKQPVMLTLVQRQIRSLLINPDWAAYIDLPDYLALDGDFACLANLAESIKNHAAVPETAQVLEYMRGSPYEETITRIFHSTHQSEEMNSSSEEDCENFQIGMKKLLNELKYSQIETLKQKSLQSGLNESEKKLLLSLLTAKQN

SEQ ID NO: 2074 - protein, 642 aa, Neisseria
MSRNQNHEEYQDDTRPLSIEEQRARLRQLIIMGKERGYITYSEINDALPDDMSDADQIDNIVSMISGLGIQVTEHAPDAEDILLSDNAAVTDDDAVEEAEAALSSADSEFGRTTDPVRMYMREMGQVDLLTREDEIIIAKKIENALKNMVQAISACPGSIAEILELIEKIRKDEIRVDEVVEAIIDPNEVLLNELGLGHLETTAPEKPSNDNSDENEDDEESEEDADEISAANLAELKQKVIGHFAQIEKDYKKMIGRLEKHHSRHKDYLAYRDAIANKLLEVRFATRQIDSLSSSLRGKVENIRKLEREIRDICLDRVHMERDYFIQNFLPEITNLEWIEEEIAKGRVWSDALDRFRHAILEKQTELADMEKETRISIEELKEINKNMVSSEKETAAAKQEMIQANLRLVISIAKKYTNRGLQFLDLIQEGNIGLMKAVDKFEYRRGYKFSTYATWWIRQAITRSIADQARTIRIPVHMIETINKMNRISRQHLQETGEEPDSAKLAELMQMPEDKIRKIMKIAKEPISMETPIGDDDDSHLGDFIEDANNVAPADAAMYTSLHEVTKEILESLTPREAKVLRMRFGIDMNTDHTLEEVGRQFDVTRERIRQIEAKALRKLRHPTRSDRLRSFLDSEDSKL

SEQ ID NO: 2075 - protein, 335 aa, Neisseria
MSTFFQQTAQAMIAKHIDRFPLLKLDQVIDWQPIEQYLNRQRTRYLRDHRGRPAYPLLSMFKAVLLGQWHSLSDPELEHSLITRIDFNLFCRFDELSIPDYSTLCRYRNWLAQDDTLSELLELINCQLTEKGLKVEKASAAVVDATIIQTAGSKQRQAIEVDEEGQVSGQTTPSKDSDARWIKKNGLYKLGYKQHTRTDAEGYIEKLHITPANAHECKHLSPLLEGLPEGTTVYADKGYDSAENRQHLEEHQLQDGIMRKACRNRPLSEVQTKRNRYLSKTRYVVEQSFGTLHRKFRYARAAYFGLIKVSVQSHLKAMCLNLLKAANRLSAPVAA

SEQ ID NO: 2076 - protein, 943 aa, Neisseria
MNKKHGFPLTLTALAIATAFPAYAAQAGGATPDAAQTQSLKEITVRAAKVGRRSKEATGLGKIVKTSETLNKEQVLGIRDLTRYDPGVAVVEQGNGASGGYSIRGVDKNRVAVSVDGVAQIQAFTVQGSLSGYGGRGGSGAINEIEYENISTVEIDKGAGSSDHGSGALGGAVAFRTKEAADLISDGKSWGIQAKTAYGSKNRQFMKSLGAGFSKDGWEGLLIRTERQGRETRPHGDIADGVEYGIDRLDAFRQTYDIKRKTREPFFSVEGERESKPVAKLAGYGKYLNNQLNRWVKERIEQNQPLSAEEEAQVREAQARHENLSAQAYTGGGRILPDPMDYRSGSWLAKLGYRFGGRHYVGGVFEDTKQRYDIRDMTEKQYYGTDEAEKFRDKSGVYDGDDFRDGLYFVPNIEEWKGDKNLVRGIGLKYSRTKFIDEHHRRRRMGLLYRYENEAYSDNWADKAVLSFDKQGVATDNNTLKLNCAVYPAVDKSCRASADKPYSYDSSDRFHYREQHNVLNASFEKSLKNKWTKHHLTLGFGYDASKAISRPEQLSHNAARISESTGFDENNQDKYLLGKPEVVEGSVCGYIETLRSRKCVPRKINGSNIHISLNDRFSIGKYFDFSLGGRYDRKNFTTSEELVRSGRYVDRSWNSGILFKPNRHFSVSYRASSGFRTPSFQELFGIDIYHDYPKGWQRPALKSEKAANREIGLQWKGDFGFLEISSFRNRYTDMIAVADHKTKLPNQAGQLTEIDIRDYYNAQNMSLQGVNILGKIDWNGVYGKLPEGLYTTLAYNRIKPKSVSNRPGLSLRSYALDAVQPSRYVLGFGYDQPEGKWGANIMLTYSKGKNPDELAYLAGDQKRYSTKRASSSWSTADVSAYLNLKKRLTLRAAIYNIGNYRYVTWESLRQTAESTANRHGGDSNYGRYAAPGRNFSLALEMKF

SEQ ID NO: 2077 - protein, 737 aa, Neisseria
MCKPNYGGIVLLPLLLASCIGGNFGVQPVVESTPTAYPVTFKSKDVPTPPPAGSSVETTPVNRPAVGAAMRLPRRNIASYKQDGTEIPDKHQAEEHLPLKEKDILFLDGTLKEQADKLKKKINERYSDVRVITSKKEEEKYQYQFVRAGYVFTRAEGKDNEKEKTSDGKEFVNRFSYDGFVYYSGERPSQSLPSAGTVQYSGNWQYMTDAKRHRTGKAVSSTDLGYTTYYGNEIGATSYEARDADDREKHPAEYTVDFDNKTLNGKLIKNQYVQNKSNPNEPKKPLTIYDITATLDGNRFTGSAKVSTEVKTQHADKEYLFFHTDADQRLEGGFFGDNGEELAGRFISNDNSVFGVFAGKQKTETENAADTKPALSSGKHTKILDSLKISVDEASDKNPREFAISSMPDFGHPDKLLVEGREIPLVNKEQTIELADGRKTTIRTCCDFLTYVKIGRMQTERPAAKPKAQDEERDEEDTGVDSVEEGEDEIDDEEGTEDAAVKDEGSEEDEAVEGEDEAEEPEEESPTEEGGSGSDGILPAPEAPKGRNIDLFLKGIRTAETDIPKTGEAHYTGTWEARIGKPIQWDNQADKEAAKAVFTVDFGKKSISGTLTEENGVEPAFHIENGKIEGNGFYATARTRENGINLSGNGSTDPKTFQASNLRVEGGFYGPQAEELGGIIFNNDGKSLGITEGTENKVDVEAEVDAEVDVGKQLESEVKHQFGVVFGAKKDMQEVEK

SEQ ID NO: 2078 - protein, 73 aa, Neisseria
MSAVNVIFSCSYWRIFKKSDSCVLCFYQFRHGEPHKLINQENFSKLYQAFDYIDSVGSNFPVIITTDGCGLFC

SEQ ID NO: 2079 - protein, 404 aa, Neisseria
MSEVEYFSHFISDGKGKLLEIPQRRGKQDGVFVDWISFTFHEDTLLKVSGCPLFSDAEYMYVLSRKLEEILGFGITRKCKSRGNKFYESMYRLGSDDVDYGEVHFGGQRNTVLVELKGTGCSVASPGWELRLKQFLDDSIRTRITRIDLALDFFDGEYTPDQALLDHDNGFFDNSNQRPKSETIGTAWRNEDGSGKTFYVGRKKNSRFVRVYEKGRQLGDKESKWVRFEIQFNYGDIEIPLDILINQGSYFCGAFPICRKFKNMPVPERFDQRKKKLNLTFEHKLHYAKNAVGKLVNFMIEMGFDNSEIVESLKADSGFPKGLEPEKYALEMLRDGLKHGFIHEQPDIDLEIELDELGVIAFKNSDKFDREKRLFSPDYDVEKERKYQEYLSKVYHQNVDYDYF

SEQ ID NO: 2080 - protein, 103 aa, Neisseria
MFNQTQTVTYPATFLGAKKFKGEIDGSNIDTCSVLVATPLPAQSGNAVGFTAAQMKFGDSKNFSKLENLKYPCEVMVTVEMTSTGKGMVPSLIDFQVAEKPKG

SEQ ID NO: 2081 - protein, 66 aa, Neisseria
MKFEERFIVQDLETHDFIYPDPFGDVGFTQNIKSAGQFESYEDALNSGINEIGGGFQIFQFFVKSE

SEQ ID NO: 2082 - protein, 94 aa, Neisseria
MKQVKKSSYFKYQKRKKTMNIVKKYAVKAALAAGIFTPAIVMADTFDPSAIGTQVANVIMGFVSMVSAVGMAAITVILAIQGFKMAWSMIKSVK

SEQ ID NO: 2083 - protein, 100 aa, Neisseria
MGYRVGINCFDTRLQADDYLLSSLPPTVTQDGKIIRPERVGDKWILNGKPVTLSYPECSNFEQIKQGSYVGSTVLILFVVIYGFRLLINFLKDIGKVGTD

SEQ ID NO: 2084 - protein, 548 aa, Neisseria
MKQNVMFIILGRNFLKIILCFSFFVSKFALASVNAPGKFDRVEVYDDGRYLGIRGSDDKRRRIWKGVFDRESGRYLTSEAQDLKVRHVSTGASSTGKVSSVVSSSVSRAGVLAGVGKLARLGAKLSTRAVPYVGTALLAHDVYETFKEDIQAQGYQYDPETDKFVKGYEYSNCLWYEDKRRINRTYGCYGVDSSIMRLMSDDSRFPEVKELMESQMYRLARPFWNWHKEELNKLSSLDWNNFVLNSCTFDWNGGDCVVNKGDDFRNGADFSLIRNSKYKEEMDAKKLEEILSLKVDANPDKYIKATGYPGYSEKVEVAPGTKVNMGPVTDRNGNPVQVVATFGRDSQGNTTVDVQVIPRPDLTPGSAEAPNAQPLPEVSPAENPANNPNPNENPGTSPNPEPDPDLNPDANPDTDGQPGTRPDSPAVPGRTNGRDGKDGKDGKDGGLLCKFFPDILACDRLPESNPAEDLNLPSETVNVEFQKSGIFQDSAQCPAPVTFTVTVLDSSRQFAFSFENACTIAERLRYMLLALAWAVAAFFCIRTVSREV

SEQ ID NO: 2085 - protein, 50 aa, Neisseria
MSQIAEKRGGIGDKREGGVPTAPPRRECGAKSFRLRNICLMRQPCLLRKG

SEQ ID NO: 2086 - protein, 94 aa, Neisseria
MKLLAALIPLLMSVAGRILTALGLMAVTYSGVDRLVAHFQQAITNSITGAPQAMLQLFYISGGGTVLNILFGAIAFILSFKQMTKLATSIGKKK

SEQ ID NO: 2087 - protein, 367 aa, Neisseria
MAEICLITGTPGSGKTLKMVSMMANDEMFKPDENGIRRKVFTNIKGLKIPHTYIETDAKKLPKSTDEQLSAHDMYEWIKKPENIGSIVIVDEAQDVWPARSAGSKIPENVQWLNTHRHQGIDIFVLTQGPKLLDQNLRTLVRKHYHIASNKMGMRTLLEWKICADDPVKMASSAFSSIYTLDKKVYDLYESAEVHTVNKVKRSKWFYTLPVIVLLIPVFVGLSYKMLSSYGKKQEEPAAQESAATEQQAVLPDKTEGEPVNNGNLTADMFVPTLSEKPESKPIYNGVRQVRTFEYIAGCIEGGRTGCACYSHQGTALKEVTELMCKDYVKNGLPFNPYKEESQGQEVQQSAQQHSDRAQVATLGGKP

SEQ ID NO: 2088 - protein, 318 aa, Neisseria
MNIIGLDISKDTIDATLHKTNGSIHYIKFKNNDDGLKQFRLWIKGNRIRKVYIGMEATGIYYEKAADMLSSYYTVYVINPLKIKDYGKSRFNRTKTDKADSNLIADYIKRHQDTLIPYQIPKNKALQKLINLKNQLHQHQKQIKNRLHSTEEDFIRNIHQDLIDTIQDKMEQVKIAISEQIKKQTDNNHYRNLQTIPSIGKDTASVLYAQLTEKHFKTANQFVSYAGLNPAIIQSGTSVRGRGRLSRYGNRRLKSTLYMPALCAYRFNAFPKLINNLKKAGKPKMVIIVAIMRKLAKLAYYIVKTGQPYDAERHRLNQ

SEQ ID NO: 2089 - protein, 105 aa, Neisseria
MSTFFQQTAQAMIAKHIDRFPLLKLDRVIDWQLIEQYLNRQKTRYLRDHRGRPAYPLLSMFKAVLLGQWHSLSDPELEHSLITRIDFNLFCRFDELSIPDYSIVD

SEQ ID NO: 2090 - protein, 544 aa, Neisseria
MTKFIFVTGGVVSSLGKGIAAASIAAILESRGLNVTMLKLDPYINVDPGTMSPFQHGEVFVTDDGAETDLDLGHYERFIDSTMTRRNSFSTGQVYENVIAKERRGDYLGGTVQVIPHITDEIKRRIHEGAAGYDVAIVEIGGTVGDIESLPFLEAIRQMRSQLGRNNTLFAHLSYVPYIAAAGEIKTKPTQHTVKEMLSIGLQPDILICRMDRTMPADERRKIALFCNVEERAIVGSYDVDSIYECPEMLHDQGIDNIITEQLQLNVQQADLTAWKKIVHAIQNPKHTVKIAMVGKYVDLTESYKSLIEALKHAGIHTETDVQITFVDSENIEKNKGDVSMLKDMDAILVPGGFGSRGVEGKIAAVRYARENNVPYLGICLGMQIALIEYARDVAGLKGANSTEFDLKCAAPVVALIDEWQTADGSVETRDESTDLGGTMRLGAQEVELKAGSLAAKIYGSGHIRERHRHRYEVNNNYVPTLEQAGLVIGGVSAGRERLVETIELPNHPWFFACQFHPEFTSNPRKGHPLFTAFVKAALNNKKA

SEQ ID NO: 2091 - protein, 556 aa, Neisseria
MEKIWLDSYEKGVSAEIDITQYNSVSDVFRQSVEKFADQPAFQNMGKTLTYAETGKLATDFASYLQNVLKLPRGERVAIMLPNVLQYPVALFGILQAGLVAVNTNPLYTPRELEHQLKDSGATAIIVLENFANTLELVLPRTQIKHVIVASVGEMFGLLKGSLINFVIRKIKKMVPEYRIRETVSFQTALKEGAKHVFQPVALNREDTALLQYTGGTTGVAKGAVLSHGNICANMLQAKEWIKNQLREGKETVIAALPLYHIFALTVNLMIFANAGSKIILITNPRDMKGFIGELKKQRVNVFIGVNTLFNAMVNRPDFAEVDFSELRLTLGGGMATQKAVAEKWKKITGTPIVEAYGLTEASPGVCCNPLNIESYSGSIGLPVSSTEVELRDANGKEVPVGQPGELWVKGPQVMQGYWNRPEETAKAIDARGFLETGDIAVMDEKGWLKLVDRKKDLVVVSGFNVYPNEIEEVIAHHGKVMEVACIGVPDEKTGEALKVFVVKKDPSLTKEELIAFCRTELTAYKVPKNIEFRDELPKSNVGKILRRELRQSTGK

SEQ ID NO: 2092 - protein, 367 aa, Neisseria
MNTTANPSNIIVGLSGGVDSSVTAALLKQQGYQVRGVFMQNWEDDDNDEYCSIKQDSFDAIAVADIIGIDIDIVNFAAQYKDKVFAYFLQEYSAGRTPNPDVLCNAEIKFKCFLDYAVGQGADTIATGHYARKEVRNGVHYLLKGLDRNKDQSYFLYRLKPFQLERAIFPLGGLEKPEVRRLAAEFKLPTAAKKDSTGICFIGERPFREFLQKYLPTDNGKMVTPEGKTVGEHVGLMFYTLGQRKGLGIGGAGEPWFVAAKDLTKNELIVVQGHDHPLLYTRSLVMNDLSFTLPERPKAGRYTCKTRYRMADAPCELRYLDDETAELVFDEPQWAVTPGQSAVLYDGDICLGGGIIQTTDKPVIITR

SEQ ID NO: 2093 - protein, 157 aa, Neisseria; identical to SEQ ID NO: 366

SEQ ID NO: 2094 - protein, 127 aa, Neisseria
MEPSSYAAEKKGKGGIRRVINAFGYSIDGIAAAYRYEAAFRQVLWLNVLLVCAAFFWVSETAVRLPLIIASFVSVIVELFNTAVEAAVDHTSTEKHELAKLAKDAGSAAQLFAMLMLAAVWLSALFG

SEQ ID NO: 2095 - protein, 319 aa, Neisseria
MMKVLFIADPMASFKTYKDTTYAMMREMAKRGWRLFHTLSGELSVNGGLVTAQASAFEFLGAKNDDDHAWFKSADKVQTALEAFDAVIMRTDPPFDMQYLYATQLLTLAEQQGAKVFNSGQAMRDFNEKLAILNFSRFIAPTLVTTRSADVRTFLKEHGDIIIKPLDGMGGMGIFRLTEKDPNIGSILETLMQLDSRTIMAQRYIPEIVHGDKRILIIGGEVVPYALARIPQNGETRGNLAAGGRGVAQELGGRDREIAETLAPELKRRGILLAGLDVIGSNLTEVNVTSPTGFQEIMKQKGFDVAAMFADAVAAWSVR

SEQ ID NO: 2096 - protein, 562 aa, Neisseria
MLNKDQFADNHFIRTIIEEDLESGKHTAVQTRFPPEPNGYLHIGHAKSICLNFGLAYIYDGLCNLRFDDTNPEKENDEYVNAIKEDVEWLGFHWAGEPRFASNYFDQLYDYAVGLIKDGKAYVDDLTPEEMREYRGTLTEAGKNSPYRDRSVEENLDLFTRMKNGEFPDGSKTLRLKIDMASGNINMRDPVIYRIRRAHHHNTGDKWCIYPMYDYTHCISDAIEGITHSLCTLEFEAHRPLYDCVLDNIPAPHATRPRQYEFSRLELLYTITSKRKLNQLVVEKHVSGWDDPRMPTISGMRRRGYTPEGLRLFAKRAGISKSENIVDMSVLEGAIREELENSAPRLMAVLNPLKVTLTNFETGRTQSRRAAFHPNHEEMGEREVPISQTIYIEADDFAENPPKGFKRLIPGGEVRLRHGYVIKCDEVVKDEAGNVVELKCSIDHDTLGKNPEGRKVKGVIHWVSAEHAAEIKVRLYDRLFTVERPDAVRGEDGEYLPFTDFLNPESVKEITAYAEPAAKDLPAESRWQFERIGYFVTDRKDHGKDTPVFNRTVTLKDSWQPK

SEQ ID NO: 2097 - protein, 257 aa, Neisseria
MKPKIQRHGEILSLVRRHQFMSVDELAAALDVTPQTIRRDIRELEEVGSLKRHHGGASSGGNLPEGLPADRQTRCQNEKNAIARLIAEHIPDGSSLFVSIGTTMEAVVSELVRRRGSLRVITNNIHAASIASARTDYTVIITSGVVRPLDGGITGVATVDFINQFKVDYAVMSTHGVESDGSLLDDDYKEVSVMQAMIANARVRFLGVDHSKFRSNALVRLGDITAFDKVFTDRLPDTAMQKMLKEAGVECLIADAV

SEQ ID NO: 2098 - protein, 300 aa, Neisseria
MDSLMTLLSVLIPMFAGFFIRVPKPYLPALDKVLSVLVYAVLLLIGVSLSRVEDLGSRLDDMALTVLWLFVCTVGANLLALAVLGKLFPWRIKGKGKGVSVGVSGSVGQLGCVLLGFAFGKLMRDIWMPSESAGMYCLMLLVFLIGVQLKSSGVSLRQVLVNRRGIRLSVWFMLSSLSGGLLFAASTDGVSWTKGLAMASGFGWYSLSGLVMTEAYGAVWGSIMLLNDLARELFALAFIPLLMKRFPDAAVGVGGATSMDFTLPVIQGAGGLEVVPVAVSFGVVVNIAAPFLMVVFSALG

SEQ ID NO: 2099 - protein, 238 aa, Neisseria
MNFENDDIIHAPTTSSLILEERHDSELFRVYALILDGITDQVLLPGKKLTESELCRQMVCSRNTVRGALSLLAHDKIVDLQPNRGAFVHVPDLKEMQDVFNARIEMETMILNILADLPDLETRLKPLYAMIRREEEASGRGDRVGWNRLSNAFHVELARLVGNDVLFDIMNTLCARSSLIVAVAGVHREEKHAINTHTHSEHREILDLLLAGRRNRVVKILRRHLGNCMERLEKTLED

SEQ ID NO: 2100 - protein, 140 aa, Neisseria
MQVTSKWIDGMCFVGTTEGGHSVVMEGSAAEGKAKRGPSPLEMLLLGVAGCSSIDVVMIAEKQRQKVTDCRATVTAKRADDAPRVFTEIHIHFKVFGHDLKESAIERAVQMSAEKYCSASIMLGKAAKITHSFEIAGADK

SEQ ID NO: 2101 - protein, 223 aa, Neisseria; identical to SEQ ID NO: 388

SEQ ID NO: 2102 - protein, 208 aa, Neisseria
MKNIVILISGRGSNMQAIVNAAIHNVRIAAVLSNSETAAGLQWAAERGIPTDSLNHKNFTSRLAFDTAMMEKIDAYQPDLVVLAGFMRILTPEFCARYEGRLMNIHPSILPSFTGLHTHERALEAGCRVAGCTIHFVTAELDCGPIVSQGVVPILDGDTADDIAARVLAVEHKLYPKAVADFAAGRLIIEGNRVRNSENADAARFLTA

SEQ ID NO: 2103 - protein, 272 aa, Neisseria
MNTIFKISALTLSAALALSACGKKEAAPASASEPAAASSAQGDTSSIGSTMQQASYAMGVDIGRSLKQMKEQGAEIDLKVFTEAMQAVYDGKEIKMTEEQAQEVMMKFLQEQQAKAVEKHKADAKANKEKGEAFLKENAAKDGVKTTASGLQYKITKQGEGKQPTKDDIVTVEYEGRLIDGTVFDSSKANGGPVTFPLSQVIPGWTEGVQLLKEGGEATFYIPSNLAYREQGAGDKIGPNATLVFDVKLVKIGAPENAPAKQPAQVDIKKVN

SEQ ID NO: 2104 - protein, 146 aa, Neisseria
MPKATFYTHVAQVPIFTCRLIARAIRDGGRILVWSDSFGQLQELDKMLWQYEAESFIPHEIWETEEAMPSEPSVLLACGGNLPRIPEGMTVLNLSDGFWNTAPVLPARVLEIVGNSLEELADARERFTAYRRSGFAIEHHGMEGKA

SEQ ID NO: 2105 - protein, 371 aa, Neisseria; identical to SEQ ID NO: 250

SEQ ID NO: 2106 - protein, 356 aa, Neisseria
MNLISRYIIRQMAVMAVYALLAFLALYSFFEILYETGNLGKGSYGIWEMLGYTALKMPARAYELIPLAVLIGGLVSLSQLAAGSELTVIKASGMSTKKLLLILSQFGFIFAIATVALGEWVAPTLSQKAENIKAAAINGKISTGNTGLWLKEKNSIINVREMLPDHTLLGIKIWARNDKNELAEAVEADSAVLNSDGSWQLKNIRRSTLGEDKVEVSIAAEENWPISVKRNLMDVLLVKPDQMSVGELTTYIRHLQNNSQNTRIYAIAWWRKLVYPAAAWVMALVAFAFTPQTTRHGNMGLKLFGGICLGLLFHLAGRLFGFTSQLYGIPPFLAGALPTIAFALLAVWLIRKQEKR

SEQ ID NO: 2107 - protein, 861 aa, Neisseria
MLEAYRKAAAERAALGIPALPLNAQQTADLVELLKSPPAGEGEFLVELLAHRVPPGVDDAAKVKASFLAAVAEGSASSPLISPEYATELLGTMLGGYNIHALIELLDDDKLASIAAKGLKHTLLMFDSFHDVQEKAEKGNKYAQEVLQSWADAEWFASRAKVPEKITVTVFKVDGETNTDDLSPAPDAWSRPDIPLHALAMLKNPRDGITPDKPGEVGPIKLLEELKAKGHPVAYVGDVVGTGSSRKSATNSVIWHTGEDIPFVPNKRFGGVCLGGKIAPIFFNTQEDSGALPIEVDVSALKMGDVVDILPYEGKIVKNGETVAEFELKSQVLLDEVQAGGRINLIIGRGLTAKAREALKLPASTAFRLPQAPAESKAGFTLAQKMVGRACGLPEGQGVRPGTYCEPRMTTVGSQDTTGPMTRDELKDLACLGFSADMVMQSFCHTAAYPKPVDVKTHKELPAFISTRGGVSLRPGDGVIHSWLNRLLLPDTVGTGGDSHTRFPIGISFPAGSGLVAFAAATGVMPLDMPESVLVRFSGKLQPGVTLRDLVNAIPLYAIKQGLLTVAKAGKKNIFSGRILEIEGLPDLKVEQAFELTDASAERSAAGCTVKLNKEPIIEYMKSNVVLMKNMIANGYQDPRTLERRIKAMEKWLANPELLEADKDAEYAAVIEINMDDIKEPIIACPNDPDDVCFMSERSGTKIDEVFIGSCMTNIGHFRAASKLLEGKADTPVRLWIAPPTKMDAKQLSDEGHYGVLGRAGARMEMPGCSLCMGNQAQVREGATVMSTSTRNFPNRLGKNTFVYLGSAELAAICSKLGKIPTVEEYQANIGIINEQGDKIYRYMNFNEIDSYNEVAETVNV

SEQ ID NO: 2108 - protein, 331 aa, Neisseria
MNLKNRHFLKLLDFTPEEITAYLDLAAELKAAKKAGREIQRMKGKNIALIFEKTSTRTRCAFEVAARDQGAGVTYLEPSASQIGHKESIKDTARVLGRMYDAIEYRGFGQEVVEELAKYAGVPVFNGLTNEFHPTQMLADALTMREHSGKPLNQTAFAYVGDARYNMGNSLLILGAKLGMDVRIGAPQSLWPSEGIIAAAHAAAKETGAKITLTENAHEAVKNVDFIHTDVWVSMGEPKEVWQERIDLLKDYRVTPELMAASGNPQVKFMHCLPAFHNRETKVGEWIYETFGLNGVEVTEEIFESPASIVFDQAENRMHTIKAVMVAALGD

SEQ ID NO: 2109 - protein, 337 aa, Neisseria
MQVYYDKDADLSLIKGKTVAIIGYGSQGHAHAANLKDSGVNVVIGLRQGSSWKKAEAAGHVVKTVAEATKEADVVMLLLPDETMPAVYHAEVTANLKEGATLAFAHGFNVHYNQIVPRADLDVIMVAPKGPGHTVRSEYKRGGGVPSLIAVYQDNSGKAKDIALSYAAANGGTKGGVIETTFREETETDLFGEQAVLCGGVVELIKAGFETLTEAGYAPEMAYFECLHEMKLIVDLIFEGGIANMNYSISNNAEYGEYVTGPEVVNASSKEAMRNALKRIQTGEYAKMFIQEGNVNYASMTARRRLNADHQVEKVGAQLRAMMPWITANKLVDQDKN

SEQ ID NO: 2110 - protein, 97 aa, Neisseria
MSNIKIVALVTVKPEYTETLAAQFKELVKASRAEEGNISYDLHQEIGKPNRFVFVENWKSQAAIDEHNASAHFQAFVQSVDGKTEALEIVLMNEVAD

SEQ ID NO: 2111 - protein, 163 aa, Neisseria
MRHILSVLIENESGAMSRVVGLFSARDYNIDSLAVAPTEDKTLSRMTIVTHGDEQVIEQITKQLNKLIEVIKVVDLNESRFVERELMLVKVRAAGKDRDEFLRLTEIYRGSIIDVTDRSYTIEITGSTDKLDSFLETVGRAQILETVRTGAAGIGRGERILKI

SEQ ID NO: 2112 - protein, 575 aa, Neisseria
MQLSGAQIIVQSLKAEGVEYVFGYPGGAVIEIYDALFQLNKFKHILTRHEQAAVHAADAYARVSGKVGVALVTSGPGVTNALTGIATAYTDSIPMVVISGQVGNSLIGTDAFQEVDTVGITRPCVKHNFLVTDINELAETIKKAFQIAASGRPGPVVVDVPKDVTQAMAKFSYPQEDIFIRSYQPVVQGHIGQIKKAVQMLASAKRPVVYFGGGVVLGNASEELTRFVRMTGAPCTGTLMGLGAYPSGDRQFLGMLGMHGTYEANLAMQNADVVLAVGARFDDRVVSVPSKFFEKAKKVIHIDVDPSSIAKRVKVDIPIVGDVKNVLSEMVALWQKQESVPSEDALGKWWKTIEEWRSRDCLWFDNGSEIIKPQYVIQKLAEITGNSAIITSDVGQHQMFAAQYYPFERPRQWLNSGGLGTMGVGLPYAIGAKLAAPDQDVFCITGDGSIQMNIQELSTCFQYRIPVNVITLNNGYLGMVRQWQEIYYGGRESETYFDSLPDFVKLAEAYGHIGIRVDKKSDVEGALLEALNQKDRLVFIDFLTDQKQNVMPMVGNGKGLDEMVLPPHMRADGKA

SEQ ID NO: 2113 - protein, 217 aa, Neisseria
MFSVPRSFLPGVFVLAALAACKPQDNSAAQVASSSASASAAENAAKPQTRGTDMRKEDIGGDFTLTDGEGKPFNLSDLKGKVVILSFGFTHCPDVCPTELLTYSDTLKQLGGQAKDVKVVFVSIDPERDTPEIIGKYAKQFNPDFIGLTATGGQNLPVIKQQYRVVSAKVNQKDDSENYLVDHSSGAYLIDKNGEVAIFSPYGSEPETIAADVRTLL

SEQ ID NO: 2114 - protein, 217 aa, Neisseria
MQDNALTIALSKGRIFEETLPLLAAAGIVPTEEPEKSRKLIIGTNHENIRLVIVRATDVPTYVRYGAADFGIAGKDVLIEHGGTGLYRPLDLEIAKCRMMVAVRKGFDYEAASQPGCRLKIATKYPEIAASHFAGKGVHVDIIKLYGSMELAPLVGLSDAIVDLVSTGNTLKANGLEAVEHIVDISSRLVVNKAALKTKYALLEPIIQAFGGAVKAK

SEQ ID NO: 2115 - protein, 299 aa, Neisseria
MVAKIKKFSDSTLSVLNNGERRFYVYCLTDLKKDKILYIGKGCGNRIFEHEWVASRSQDPVSGEIIDRKLKAISKCKKLGRYIISYHLTEVEALAAESALIHFVKSVLGKKLKNKIAGHGPGGISVEELDRRFGFSSLPLNEINPDGLILAIKIHNAFDLDTDEELDYLFDNQDDANLKSRTLGNWVIGKDVASKVKYVIGVHTGLQNAVVSAYEVDGFETMVEETKNGRKQSRYRFRTTSRSEEVLAKLGLQQKCLPELKFGSGGEKAYIRPKTETETEQENIQTTPNPKIKKEKTKS

SEQ ID NO: 2116 - protein, 429 aa, Neisseria
MKKLNTQSPDFQAGLKALLAFETAQNPETERIVADICADVQKRGDAALIEYTNKFDQTNAKSIDDLILTQADLNAAFERIPNDVQTALQTAARRVESYHQRQKMESWSYTDEDGTLLGQQITPLDRVGIYVPGGKAAYPSSVIMNAMPAHVAGVKEIIMVVPTPKGERNDIVLAAAYVAGVTKVFTVGGAQAVAALAYGTETIPQVDKITGPGNAFVAAAKRRVFGVVGIDMVAGPSEILVIADGTTPADWVAMDLFSQAEHDEIAQAILIGTSQAYLDEVEAAMDRLIETMPRRDIIEASLGNRGAMILAKDLDEACEIANYISPEHLELSVENPQEWAKKIRHAGAIFMGRYTGESLGDYCAGPNHVLPTSRTARFSSPLGTYDFQKRSSLIQVSEQGAQKLGETASVLAHGESLTAHARAAEFRMK

SEQ ID NO: 2117 - protein, 365 aa, Neisseria
MKSVRSFIRDDIQAMSAYQIADVPPGFAKLDSMESPVHPFAGHETLLQEWQARLAAAPIHLYPNPSGSGLQEALRSAFDIPDCADIALGNGSDELIQFITMLTAKPGAAMLAAEPSFVMYRHNAALYGMDYVGVPLNGDFTLNLPAVLEAVRKHRPALTFIAYPNNPTGVCFTRAEIEAVIEASDGIVVVDEAYGAFNGDSFLPQAGRIPNLIVLRTLSKIGFAGLRIGYAAGCPEVIGELQKILPPYNMNQLSLTTAKLALRHYGIISANIDSLKNERERMFAELGKICRLNTFSSQANFITIRVPDADLLFDTLKQNRILVKKLHGAHPLLEHCLRITVGSPAQNDAVLNIIRQLYCQPTDFL

SEQ ID NO: 2118 - protein, 305 aa, Neisseria
MNLTKTQRQLHNFLTLAQEAGSLSKLAKLCGYRTPVALYKLKQRLEKQAEDPDARGIRPSLMAKLEKHTGKPKGWLDRKHRERTVPETAAESTGTAETQIAETASAAGCRSVTVNRNTCETQITVSINLDGSGKSRLDTGVPFLEHMIDQIARHGMIDIDISCKGDLHIDDHHTAEDIGITLGQAIRQALGDKKGIRRYGHSYVPLDEALSRVVIDLSGRPGLVYNIEFTRALIGRFDVDLFEEFFHGIVNHSMMTLHIDNLSGKNAHHQAETVFKAFGRALRMAVEHDPRMAGQTPSTKGTLTA

SEQ ID NO: 2119 - protein, 289 aa, Neisseria
MSANEYAQIGWIGLGQMGLPMVTRLLDGGIEVGVYNRSPDKTAPISAKGAKVYGNTAELVRDYPVIFLMVSDYAAVCDILNGVRDGLAGKIIVNMSTISPTENLAVKALVEAAGGQFAEAPVSGSVGPATNGTLLILFGGSEAVLNPLQKIFSLVGKKTFHFGDVGKGSGAKLVLNSLLGIFGEAYSEAMLMARQFGIDTDTIVEAIGGSAMDSPMFQTKKSLWANREFPPAFALKHASKDLNLAVKELEQAGNTLPAVETVAASYRKAVEAGYGEQDVSGVYLKLAEH

SEQ ID NO: 2120 - protein, 143 aa, Neisseria
MNQLDQLGTRINLICNVFDKWIGQQDLNYNLFAVLYTLATEGSRTQKHIGEKWSLPKQTVSGVCKTLAGQGLIEWQEGEQDRRKRLLSLTETGKAYAAPLTESAQEFSDKVFATFGDKRTTRLFADLDALAEVMEKTISENKK

SEQ ID NO: 2121 - protein, 288 aa, Neisseria
MWKMLKHIAQTHRKRLIGTFSLVGLENLLMLVYPVFGGRAINAVIAGEVWQALLYALVVLLMWLVGAVRRIADTRTFTRIYTEIAVPVVLEQRQRQVPHSAVTARVALSREFVSFFEEHLPIAATSVVSIFGACIMLLVLEFWVGVSAVGILALFLWLLPRFAAISENLYFRLNNSLERDNHFIRKGDRRQLYRHYGLLARLRVLISNREAFGYLCVGTAMGILFGFAFVMMTLKGYSSAGHVYSVGTYLWMFAMSLDDVPRLVEQYSNLKDIGQRIEWSERNIKAGT

SEQ ID NO: 2122 - protein, 367 aa, Neisseria
MMDNIDMFMPEQEEIQSMWKEILLNYGIFLLELLTVFGAIALIVLAIVQSKKQSESGSVVLTDFSENYKKQRQSFEAFFLSGEEAKHQEKEEKKKEKAEAKAEKKRLKEGGEKSAETQKSRLFVLDFDGDLYAHAVESLRHEITAVLLIAKPEDEVLLRLESPGGVVHGYGLAASQLRRLRERNIPLTVAVDKVAASGGYMMACVADKIASAPFAIVGSVGVVAEVPNIHRLLKKHDIDVDVMTAGEFKRTVTFMGENTEKGKQKFRQELEETHQLFKQFVSENRPQLDIEEVATGEHWFGRQALALNLIDEISTSDDLLLKAFENKQVIEVKYQEKQSLIQRIGLQAEASVEKLFAKLVNRRADVM

SEQ ID NO: 2123 - protein, 187 aa, Neisseria
MPWNLPIFLTWLRVLLIPVLTALFYLPFPWFAEETINLTAAVIFAVAALTDWFDGFLARLWKQTSDFGAFLDPVADKLMVAVSLLLLVKLDRTYVLFAMIIIGREITISALREWMAQMGKRNSVAVATVGKFKTAAQMLAIFLLLLNFPDFYGFNLAFIGNVLMFIASLLTVWSMLYYLKMAWKEIA

SEQ ID NO: 2124 - protein, 80 aa, Neisseria
MVCRHKLSAVVRRFYCTLPDGISRTRKNIRICGIDRYRPQPQRTGNQTGCRRAALPAFLLWVRQFVHRRQYRQNHQGGAG

SEQ ID NO: 2125 - protein, 111 aa, Neisseria
MFKDWKEHTALVKKSFGELGKAHPKMLQAYGALEQAAAAEALDAKTRELIAIAVAITTRCESCISVHAAAATKAGATDSEIAGALATAIALNAGAAYTYALRALEAVETQK

SEQ ID NO: 2126 - protein, 301 aa, Neisseria
MDILDKLVDFAQLTGSVDVQCLLGGQWSVRHETLQREGLVHIVTSGSGYLCIDGETSPRPVSTGDIVFFPRGLGHVLSHDGKCGESLQPDMRQHGAFTVKQCGNGQDMSLFCARFRYDTHADLMNGLPETVFLNIAHPSLQYVVSMLQLESKKPLTGTVSMVNALSSVLLVLILRAYLEQDKDVELSGVLKGWQDKRLGHLIQKVIDKPEDEWNVDKMVAAANMSRAQLMRRFKSRVGLSPHAFVNHIRLQKGALLLKKNPDSVLSVALSVGFQSETHFGKAFKRQYHVSPGQYRKEGGQK

SEQ ID NO: 2127 - protein, 162 aa, Neisseria
MKKYLIPLSIAAVLSGCQSIYVPTLTEIPVNPINTVKTEAPAKGFRLASSHWTDVAKISDEATRLGYQVGIGKMTKVQAAQYLNNFRKRLVGRNAVDDSMYEIYLRSAIDSQRGAINTEQSKLYIQNALRGWQQRWKNMDVKPNNPAFTNFLMEVMKMQPLK

SEQ ID NO: 2128 - protein, 287 aa, Neisseria
MLVAAACFTIMNVLIKEASAKFALGSGELVFWRMLFSTVALGAAAVLRRDTFRTPHWKNHLNRSMVGTGAMLLLFYAVTHLPLATGVTLSYTSSIFLAVFSFLILKERISVYTQAVLLLGFAGVVLLLNPSFRSGQETAALAGLAGGAMSGWAYLKVRELSLAGEPGWRVVFYLSVTGVAMSSVWATLTGWHTLSFPSAVYLSCIGVSALIAQLSMTRAYKVGDKFTVASLSYMTVVFSALSAAFFLGEELFWQEILGMCIIILSGILSSIRPTAFKQRLQSLFRQR

SEQ ID NO: 2129 - protein, 376 aa, Neisseria
MTKHLPLAVLTALLLAACGGSDKPPAEKPAPAENQNVLKIYNWSEYVDPETVADFEKKNGIKVTYDVYDSDETLESKVLTGKSGYDIVAPSNAFVGRQIKAGAYQKIDKSLIPNYKHLNPEMMRLMDGVDPGHEYAVPFYWGTNTFAINTERVKKALGTDKLPDNQWDLVFDPEYTSKLKQCGISYLDSAAEIYPMVLNYLGKNPNSSNTEDIREATALLKKNRPNIKRFTSSGFIDDLARGDTCVTIGFGGDLNIAKRRAEEAGGKEKIRVMMPKEGVGIWVDSFVIPKDAKNVANAHKYINDFLDPEVSAKNGNFVTYAPSSKPARELMEDEFKNDNTIFPTEEDLKNSFIMVPIQPAALKFMVRQWQDVKAGK

SEQ ID NO: 2130 - protein, 874 aa, Neisseria
MKTSELRQKFLKFFETKGHTVVRSSSLVPHDDPTLLFTNAGMNQFKDVFLGFDKRPYSRATTAQKCVRAGGKHNDLENVGYTARHHTFFEMMGNFSFGDYFKRDAIHFAWEFLTSPEWLNIPKDKLLATVYAEDDEAYNIWLNEIGMPSERIVRIGDNKGAKYASDNFWQMGDTGPCGPCSEIFYDHGEEIWGGIPGSPEEDGDRWIEIWNCVFMQFNRDEQGNMNPLPKPSVDTGMGLERIAAVMQHVHSNYEIDLFQDLLKAVARETGAPFRMEEPSLKVIADHIRSCSFLIADGVLPSNEGRGYVLRRIIRRAVRHGYKLGQSKPFFHKLVADLVKEMGGAYPELKEKQAQIEEALKNEESRFAQTLETGMALLENALVKGGKTLGGEIIFKLYDTYGFPYDLTADICRERNIEPDEAGFEREMEAQRARARAAQSFKANAQLPYDGQDTEFKGYSERQTESKVLALYKDGEQVNELNEGDSGAVVIDFTPFYAESGGQVGDVGYIFSGENRFEVRDTQKIKAAVFGQFGVQTSGRLKVGDSVTAKVDDEIRNANMRNHSATHLMHKALRDVLGRHVEQKGSLVTAESTRFDISHPQAVTAEEIAEVERRVNEAILANVAVNAAIMSMEDAQKTGAMMLFGEKYGEEVRVLQMGGFSTELCGGTHVSRTGDIGLFKIISEGGIAAGVRRIEAITGLNALKWAQEQERLVKDIIAETKAQTEKDVLAKIQAGAAHAKALEKELARAKAELAVHAGAKLLDDAKDLGAAKLVAAQIEADAAALREIVTDLTGKSDNAVILLAAVNDGKVSLCAGVSKPLTGKVKAGDLVKFAAEQVGGKGGGRPDLAQAGGTDADKLPAVLDSVKDWVGAKLV

SEQ ID NO: 2131 - protein, 68 aa, Neisseria
MQRGRLKGLVCRRLGRDPTNFVKYKNVGHDPTYLPFCTKRLSERPCLPYGGSRPSRFLLGYDPSYLLR

SEQ ID NO: 2132 - protein, 143 aa, Neisseria
MSISLIGLHITIAIILFFTTNFMGKKSSIFGYYQLSFSEENHSPAFNIFYRAFTPILFIVIFSWVVTSLEIPISLEKINYVVIYYFIIRLLSVFVFEKTHIVNWFNQLTIPILSITLSFIVYNKMILPKSFLLPSSQEVATTF

SEQ ID NO: 2133 - protein, 63 aa, Neisseria
MHKKFESYFGKIIDKIIKEDSYNNDDFLTDKKKALIYSVLIYENFNRGLVYRYFEKNYFVLVE

SEQ ID NO: 2134 - protein, 95 aa, Neisseria
MQVTSAEYLSNEESIKKGGNILMEKYNEKYNESIDGNKTLYKSYYESRRESIKNYNPDAKYINEIESIYMMLGEIYPNAPDFMSPHFEGDCSEGE

SEQ ID NO: 2135 - protein, 85 aa, Neisseria
MSGINARPTNSIFSNLCQIFSSLQGCLKTQTPFSDGLFSLKSPYRSIRKHRRIIMEVTISAIINGEFADQYGKRGSQFNENGMLI

SEQ ID NO: 2136 - protein, 335 aa, Neisseria
MSTFFQQTAQAMIAKHIDRFPLLKLDRVIDWQLIEQYLNRQKTRYLRDHRGRPAYPLLSMFKAVLLGQWHSLSDPELEHSLITRIDFNLFCRFDELSIPDYSTLCRYRNRLAQDNTLSELLELINRQLTEKGLKIEKASAAVVDATIIQTAGSKQRQAIEVDEEGQISGQTTPSKDSDARWIKKNGLYKLGYKQHTRTDAEGYIEKLHITPANAHECKHLSPLLEGLPKGTTVYADKGYDSAENRQHLEEHQLQDGIMRKACRNRPLSEVQTKRNRYLSKTRYVVEQSFGTLHRKFRYARAAYFGLIKVSAQSHLKAMCLNLLKAANRLSAPAAA

SEQ ID NO: 2137 - protein, 372 aa, Neisseria
MLIHYIDIAKRNFVIAVSSLSKTKTETNNPKGIAHTIEYLKKHKVALVVTESTGGLEIPAAKAIHRAGIAVIIANPRQTHQFAQSQSLTKTDAKDAKMPAFFAQMKAQKEDWQTMPYHPPTEAEEVLEALVNRRNQSADMRTAEKNRLHQVHETQVGSVKQLIAHFDRLIDESDKQIDDHTHTHFDGKAQVAEQIKGIGSITTATLMAMLPELGRLSHKRIASLVGIAPHPRKSGEAKFKSRCFGGRSAVLKALYMATVAATRFEPLIRDFHQRPLSEGKPYKVAVTACMRKLLETFAKFLSLTTTEIPTQVFGCFRPKYRLILPKHPLNPPRTPDNQASGLPFRRQRAHLACWRLSTGSNTSPSDGFAHSL

SEQ ID NO: 2138 - protein, 314 aa, Neisseria
MSASKKFPIPLSYFSIALGLFALGLSWRYGASVGLLPALAAESLLAAASVVWLLLVAAYLIKMFAYRNDFLSDLRDLVQCCFISAIPITAMLEGLALKPYQAGAAAVLIYVGVAGQLAFSMYRAAGLWRGLHSLEATTPIIYLPTVATNFVSASSLAALGHHDYAALFFGAGMFSWLSLEASILGRLRTAAPVGTAARGVVGIQLAPAFVGCGAYFAVGGKVDGFALALIGYGCLQLLFLLRLTRWFWEGGFTMSFWGFSFGFAAMAGCGLHLAASGVLSGLGLTLATAGSAGVALLLVGTLHRIATGRFLVRS

SEQ ID NO: 2139 - protein, 227 aa, Neisseria
MELVFIRHGQSEWNAKNLFTGWRDVKLSEQGLAEAAAAGKKLKENGYEFDIAFTSVLTRAIKTCNIVLEESDQLFVPQIKTWRLNERHYGQLQGLDKKQTAEQYGDEQVRIWRRSYDTLPPLLDKDDEFSAHKDRRYAHLPADVVPDGENLKVTLERVLPFWEDQIAPAILSGKRVLVAAHGNSLRALAKHIEGISDEDIMGLEIPTGQPLVYKLDDNLKVIEKFYL

SEQ ID NO: 2140 - protein, 767 aa, Neisseria
MNTQAHAPHTDSNTLMLGRYAERAYLEYAMSVVKGRALPEVSDGQKPVQRRILFAMRDMGLTAGAKPVKSARVVGEILGKYHPHGDSSAYEAMVRMAQDFTLRYPLIDGIGNFGSRDGDGAAAMRYTEARLTPIAELLLSEINQGTVDFVPNYDGAFDEPLHLPARLPMVLLNGASGIAVGMATEIPPHNLNEVTQAAIALLKKPTLETADLMQYIPAPDFAGGGQIITPADELRRIYETGKGSVRVRARYEIEKLARGQWRVIVTELPPNANSAKILAEIEEQTNPKPKAGKKQLNQDQLNTKKLMLDLIDRVRDESDGEHPVRLVFEPKSSRIDTDTFINTLMAQTSLEGNVSMNLVMMGLDNRPAQKNLKTILQEWLDFRTVTVTRRLKFRLNQVEKRLHILEGRLKVFLHIDEVIKVIRESDDPKADLMAAFGLTEIQAEDILEIRLRQLARLEGFKLEKELNELREEQGRLNILLSDENEKRKLIVKEMQADMKQYGDARRTLVEEAGRAVLTQTTADEPITLILSEKGWIRSRAGHNLDLSQTAFKEGDCLKQTLEGRTVLPVVILDSSGRTYTLDAAEIPGGRGDGVPVSSLIELQNGAKPVAMLTGLPEQHYLLSSSSGYGFITKLGDMVGRVKAGKVVMTADSGETVLPPVAVYASSFINPDCKIIAATSQNRALAFPIGELKIMAKGKGLQIIGLNAGESMTHTAVSSELEILIESEGRRGAAHKDRIPISLLEAKRGKKGRLLPISGSLKQLSSPK

SEQ ID NO: 2141 - protein, 505 aa, Neisseria
MVISNPRELEKLKDRIPNLINIIRVAIVFPLMIMHILGLETGSRANLHASWTAWAFYVWLAIACWLIFFSIIHPHWQWQSLKMPRFSAVADITMIGVLTYLFGGIDSGFGILILPFVVCSCLLSYGRYPLLYSSYAAILLIFNAIADGDIGKYPLISDARTASATFILVAASYLSAIFTSLSVKYIDRAGKLAYDSHIAYHRIKGLSQTVLERVQEAVVVINAEGLAVLFNRKAKDLFPALEIGRRAGLSDSAAELWDQASPHTFEYVLGTPGLNAGIRAVPVNKGSDKLLILYIRPQSEIQAEALSVKLAALGQLTANLAHEIRNPMSAIRHANDLLRENMEAGAADPFNAKLCKIIDGNICRIDKMLEDISSLNKRNKTERETIGLIPFWEEFKQEFLLGHPDAADCIRPDIQGGSPTAYFDPAHLRQIMWNLANNAWRHSRKQPGSISVTIRPAQKNTVCILFADRPKCRNTCSNPFTPRRKTAPASGCMSPANWRTPISAI

SEQ ID NO: 2142 - protein, 155 aa, Neisseria
MTELQHPVLVVDDETDILDLMEMTLMKMGLRVHTASGVAEAKNKLDSQRYSLVLTDMRMPDGSGLEVVQHINSRLLDTPVAVITAFGNADQAQEALRCGAFDPDTMQIQDYLDQIERDIIEQTLKQTEGNRTQAAKRLGISFRSMRYRMERLNIG

SEQ ID NO: 2143 - protein, 250 aa, Neisseria
MTDILIDNTATETVRTLIRAFPLVPVSQPPEQGSYLLAEHDTVSLRLVGEKSSVIVDFASGAAQYRRTKGGGELIAKAVNHTAHPTVWDATAGLGRDSFVLASLGLAVTAFEQHPAVACLLSDGIRRALLNPETQNTAAHINLHFGNAAEQMPALVQTQGKPDIVYLDPMYPERRKSAAVKKEMTYFHRLVGEAQDEAALLHTARQTAKKRVVVKRPRLGEHLAGQDPAYQYTGKSTRFDVYLPYGTDKG

SEQ ID NO: 2144 - protein, 389 aa, Neisseria
MSKKLHPQTLAIRGGKEQTEYREHNQALFLTSSFMWDNAQHAADLFSKKIKGFTYTRTANPTTAAFEKRIAALEGAERAVATSAGMSAIQAAFFTFLQAGDHVISSRSLFGTTVGFINNIVAKFGIEVSHVSPTDINEWKAAVKANTKLLFLETPSNPLGEVADLEALAELAHGIGALLVVDNSLLSPVGSQPLKHGADISVSSATKAIDGHGRVMGGVLAGSEELLAQVAMYCNSCGLAMSPFNAWQLLSGVETLSLRMEKQFDNALKIAQWLQAQPQVQAVYYTGLSDHPQAALIRKQQNGGGIVIGFEVADQEAAWKVVDGVELFSRTANLGDVRSTITHPWTTTHGRMQPEEKLAANIRPGLVRLSVGLEYVGDLIDDLKQALAR

SEQ ID NO: 2145 - protein, 253 aa, Neisseria
MDANKEPNWEKRLENLRQTRRMKAVPTYAPLSRPSETGTDAPVPKLDDESRARVLKAYLKKWQEEHNAAVADCGEEVETDPMIVLQENWLNAQASLQMSVSEKHIESRRRIRFDTKKDSVEFETGQIESGENADEAESGTNEPAVSENGENDAEETLMPVQINILNPKAVNRREVFCLSEQELTERLIKRLRPHLTDTVNGIIRTAVQKQMAVFTYQLQQMLHEQAGAVVEDVLEHDVRKILNDIKYELKYKR

SEQ ID NO: 2146 - protein, 83 aa, Neisseria
MGSIEQRLEYLEEANDVLRMQNHVLSTAFKALIRALPAETAEIAVESIQLAFEDALAELSYEDSPHTDLFHDVTYAFFREKER

SEQ ID NO: 2147 - protein, 268 aa, Neisseria
MNMKKWIAAALACSALALSACGGQGKDTAAPAANPDKVYRVASNAEFAPFESLDSKGNVEGFDVDLMNAMAKAGNFKIEFKHQPWDSLFPALNNGDADVVMSGVTITDDRKQSMDFSDPYFEITQVVLVPKGKKVSSSEDLKNMNKVGVVTGYTGDFSVSKLLGNDNPKIARFENVPLIIKELENGGLDSVVSDSAVIANYVKNNPAKGMDFVTLPDFTTEHYGIAVRKGDEATVKMLNDALEKVRESGEYDKIYAKYFAKEDGQAAK

SEQ ID NO: 2148 - protein, 507 aa, Neisseria
MTVIKQEDFIQSICDAFQFISYYHPKDYIDALYKAWQKEENPAAKDAMTQILVNSRMCAENNRPICQDTGIATVFLKVGMNVQWDADMSVEEMVNEGVRRAYTWEGNTLRASVLADPAGKRQNTKDNTPAVIHMSIVPGGKVEVTCAAKGGGSENKSKLAMLNPSDNIVDWVLKTIPTMGAGWCPPGILGIGIGGTPEKAVLMAKESLMSHIDIQELQEKAASGAELSTTEALRLELFEKVNALGIGAQGLGGLTTVLDVKILDYPTHAASKPIAMIPNCAATRHVEFELDGSGPVELTPPRVEDWPDLTYSPDNGKRVDVDKLTKEEVASWKTGDVLLLNGKILTGRDAAHKRLVDMLNKGEELPVDFTNRLIYYVGPVDPVGDEVVGPAGPTTATRMDKFTRQMLEQTDLLGMIGKSERGVATCEAIADNKAVYLMAVGGAAYLVAKAIKSSKVLAFPELGMEAIYEFEVKDMPVTVAVDSKGESIHATAPRKWQAKIGIIPVES

SEQ ID NO: 2149 - protein, 470 aa, Neisseria
MKILILGNGQVGSTVAQNLAAIPNNDVTVIDIDEKALQETGSRLDVQTVFGNGASPFTLERAGAEDADLLLALSRSDETNIVACKVAADLFNIPGRIARVRSSEYLEYLSPKLENNENGSLSIFGITETISPEQLVTEQLAGLIDCPGALQVLRFADDRVRMVIIQARRGGLLVGRSIADIAQDLPDGADCQICAVYRNNRLIVPAPQTVIIEGDEILFAAAAENIGAVIPELRPKETSTRRIMIAGGGNIGYRLAKQLEHAYNVKIIECRPRRAEWIAENLDNTLVLQGSATDETLLDNEYIDEIDVFCALTNDDESNIMSALLAKNLGAKRVIGIVNRSSYVDLLEGNKIDIVVSPHLITIGSILAHIRRGDIVAVHPIRRGTAEAIEVVAHGDKKTSAIIGRRISGIKWPEGCHIAAVVRAGTGETIMGHHTETVIQDGDHIIFFVSRRRILNELEKLIQVKMGFFG

SEQ ID NO: 2150 - protein, 87 aa, Neisseria
MFSGESAASEHTAHAHIDLPSLAHRVHRRPLRLKIKLPSVVGITTQKNELLDIPMFFICFYIVMRSDKRPPDICLDGIVLLNFYKYV

SEQ ID NO: 2151 - protein, 268 aa, Neisseria
MKSSFVQTLTIAGSDSGGGAGIQADLKTFQMRGVFGTCVITAVTAQNTLGVSAVHLVPTETITAQIQAIREDFDIRAYKIGMLGTAEIIECVADKLKHCSFGRRVLDPVMIAKGGAPLLQDSAVAALTRLLLPDTDVLTPNLPEAEALTGVHIENRKDAERAAKILLDYGVKNVVIKGGHLNGSTSGRCTDWLFTQNETLEFDSPRFPTAHTHGTGCTFSACITAELAKGSDVCEAVQTAKAYITAAISNPLEIGAGHGPVNHWAYRD

SEQ ID NO: 2152 - protein, 289 aa, Neisseria
MKERIVGQSGELFCFGQMPVWKVENLPEVLLSGYSSEEGEWVCLNVLQGDVEVRAPDGSAEVWSADGGDCVFAPQQVFSVKPKTDDAEIRLSLYCAAADYFHKKYGMSATHSAVAAARDTVPAGRALDMGCGQGRNALFLGLKGFEVTAVDHNPAALANVAELAEAEGLNVRTLEYDLNAAALQGEFDYIVATVVLMFLMPQRVPDVIADMQAHTAAGGYNLIVSAMDTADFPCPMPFPFKFKEGELKDYYRDWELVEYKEELGSMHAKDENGNPIRFKFVTMLAKKPE

SEQ ID NO: 2153 - protein, 145 aa, Neisseria
MNQTVYLYTDGACKGNPGAGGWGVLMRYGSHEKELFGGEAQTTNNRMELTAVIEGLKSLKRRCTVIICTDSQYVKNGMENWIHGWKRNGWKTASKQPVKNDDLWKELDALVGRHQVSWTWVKGHAGHAENERADDLANRGAAQFS

SEQ ID NO: 2154 - protein, 134 aa, Neisseria
MTAQPCPICTAQNEDVLLQTPNLRVIAVHNDSGSPAFCRVIWRKHIAEMTDLSAAERGELMEMVYKVEAAMRQVFRPAKINLASLGNVVPHLHWHIIARFENDASFPAPIWANPVRKHGMTLPQDWTEQLKKLL

SEQ ID NO: 2155 - protein, 394 aa, Neisseria
MTEPTSRRRFLKTCTAAAGAGLLQACGTSATSVPPLPSSHSVVKARTVPLQTPRRQSSDGNLLRVVASSGFAEDTNRVNTALTRLYNVGFTVTNQQAGSRRFQRFAGTDTQRAADFQEVASGRVATPKVLMGLRGGYGAARILPHIDFASLGARMREHGTLFFGFSDVCAVQLALLAKGNMMSFAGPMAYSDFGKPAPGAFTMDAFIKGATQNRLTVDVPYIQRADVETEGILWGGNLSVLASLAGTPYMPDIDGGILFLEDVGEQPYRIERMLNTLYLSGILKKQRAIVFGNFRMEKIRDVYDPSYDFSAVANHVSRTAKIPVLTGFPFGHIADKITFPLGAHARIRMNGNSGYSVAFEGYPTLDASALTLDTLLPPPDLPIFPESGVADISE

SEQ ID NO: 2156 - protein, 177 aa, Neisseria
MGIYDFQMKDAEGNAVDLSGYRGKVLLIVNTATRCGLTPQYEALQKLYAQYTAEGLEILDFPCNQFREQAPESSGEIAQVCMMKFGTKFKIFDKIEVNGANTAPLYAYLKSVKPQDKGNHLFKDFVLKLAALGEKRDEGDIKWNFTKFLVNRDGEVVERFAPSVTPEEIEADIRALL

SEQ ID NO: 2157 - protein, 751 aa, Neisseria
MGQYKKLWYLLFAVLAVCFTILGYMGSEVYKKAPPYPEQVVSASGKVLMTKDDILAGQSAWQTTGGMEVGSILGHGAYQAPDWTADWLHRELVAWLDLTAQQTYGKKFDEVSPEEQAVLKTRLADEYRNQSRVKEDGSVVISDTRVKAIESILPYYHGVYSDDPKFQTTREHFAMKNNTLPSQEAREKLFNFFFWTSWSASTNRPDENFTYTNNWPHEPLINNVPTTENYMWSFTSVVLLLMGIGLLMWGYSFLTKHEEVEVPSEDPISKIQLTPSQKALGKYVFLTVALFVVQVLLGGLTAHYTVEGQGFYGIDEALGFEMSDWFPYALTRTWHIQSAIFWIATGFLTAGLFLAPIVNGGKDPKFQRAGVNFLYIALFIVVGGSYAGNFFALTHILPPEFNFWFGHQGYEYLDLGRFWQLLLMVGLLLWLFLMLRCTVSAFKEKGVDKNLLAIFVASMVGVGVFYAPGLFYGEKSPIAVMEYWRWWVVHLWVEGFFEVFATAAFAFVFYNMGFVRRSTATASTLAAAAIFMLGGVPGTLHHLYFSGSTSASMAIGACFSALEVVPLVLLGREAYEHWSYQHLSDWAKRLRWPLMCFVAVAFWNMIGAGVFGFLINPPISLFYIQGLNTSAVHAHAALFGVYGFLALGFVLLVARYLKPNAQFDDKLMTWGFWLLNGGLAGMIAISLLPVGAIQAYASITHGLWYARSEEFLQMEILDTLRWVRTAADLVFIGGAICVAIQATKIVFGRDK

SEQ ID NO: 2158 - protein, 390 aa, Neisseria
MKRQALAAMIASLFALAACGGEPAAQAPAETPAAAAEAASSAAQTAAETPSGELPVIDAVTTHAPEVPPAIDRDYPAKVRVKMETVEKTMTMEDGVEYRYWTFDGDVPGRMIRVREGDTVEVEFSNNPSSTVPHNVDFHAATGQGGGAAATFTAPGRTSTFSFKALQPGLYIYHCAVAPVGMHIANGMYGLILVEPKEGLPKVDKEFYIVQGDFYTKGKKGAQGLQPFDMDKAVAEQPEYVVFNGHVGAIAGDNALKAKAGETVRMYVGNGGPNLVSSFHVIGEIFDKVYVEGGKLINENVQSTIVPAGGSAIVEFKVDIPGSYTLVDHSIFRAFNKGALGQLKVEGAENPEIMTQKLSDTAYAGNGAAPAASAPAASAPAASASEKSVY

SEQ ID NO: 2159 - protein, 251 aa, Neisseria
MKYVRLFFLGAALAGTQAAAAEMVQIEGGSYRPLYLKKDTGLIKVKPFKLDKYPVTNAEFAEFVNSHPQWQKGRIGSKQAEPAYLKHWMKNGSRSYAPKAGELKQPVTNVSWFAANAYCAAQGKRLPTIDEWEFAGLASATQKNGSNEPGYNRTILDWYADGGRKGLHDVGKGRPNYWGVYDMHGLIWEWTEDFNSSLLSSGNANAQMFCSGASIGSSDSSNYAAFLRYGIRTSLQSKYVLHNLGFRCTSR

SEQ ID NO: 2160 - protein, 318 aa, Neisseria; identical to SEQ ID NO: 2088

SEQ ID NO: 2161 - protein, 367 aa, Neisseria; identical to SEQ ID NO: 2087

SEQ ID NO: 2162 - protein, 94 aa, Neisseria; identical to SEQ ID NO: 2086

SEQ ID NO: 2163 - protein, 517 aa, Neisseria
MLGMFSVNSYAERFKYPIGNSDVRLDIDHKKSVVTDFRVDGQRFSGRIIEPSIIEHVPTGARSLEKVPVKFTASVSRAAVLSGVGKLARLGAKLSTRAVPYVGTALLAHDVYETFKEDIQAQGYQYDPETDKFVKGYEYSNCLWYEDKRRINRTYGCYGVDSSIMRLMSDDSRFPEVKELMESQMYRLARPFWNWHKEELNKLSSLDWNNFVLNRCTFNWNGGDCLVNKGDDFRNGADFSLIRNSKYKEEMDAKKLEEILSLKVDANPDKYIKATGYPGYSEKVEVAPGTKVNMGPVTDRNGNPVQVVATFGRDSQGNTTVDVQVIPRPDLTPGSAEAPNAQPLPEVSPAENPANNPNPNENPGTSPNPEPDPDLNPDANPDTDGQPGTRPDSPAVPGRTNGRDGKDGKDGKDGGLLCKFFPDILACDRLPESNPAEDLNLPSETVNVEFQKSGIFQDSAQCPAPVTFTVTVLDSSRQFAFSFENACTIAERLRYMLLALAWAVAAFFCIRTVSREV

SEQ ID NO: 2164 - protein, 121 aa, Neisseria
MTCFKIRLSKQPLKGRTMNKPFITQAQLALYKYQPSSKYYGKTMAYTFASELLDYSKVNKFIIHEEIQCFLNRRISNNIWKIYFSDESVAYIKILELQDDYSRGIEIKTFDFNPNVGDVFG

SEQ ID NO: 2165 - protein, 100 aa, Neisseria
MGYRVGINCFDTRLHADDYLLSSLPPTVTQDGKIIRPERVGEKWVLNGKPVMLSYPKCSNFEQIKQGSYVGSTVLILFVVIYGFRLLINFLKDMGKVGID

SEQ ID NO: 2166 - protein, 94 aa, Neisseria; identical to SEQ ID NO: 2082

SEQ ID NO: 2167 - protein, 66 aa, Neisseria; identical to SEQ ID NO: 2081

SEQ ID NO: 2168 - protein, 103 aa, Neisseria; identical to SEQ ID NO: 2080

SEQ ID NO: 2169 - protein, 402 aa, Neisseria
MSEAEYFSHFISNGNGKLLEIPQRRGRQDGVFIDWLSFTLHEDSLLKVSGCPLVSDAEYMFVLSKKLEEILGFGITSRCKSKGNKFYDSMFRLGSEEVDYGEVHYGGQRNTVLIELKGVGCNIANPGWELRLKQFLEDSLRPRITRVDLALDFFDGEYTPEQALLDHDNGFFDNSNMRPKSEMVGTAWRREDGSGKTFYVGRKKNSRFVRVYEKGRQLGDKESKWVRFEIQFNHGDMEIPLDILINQGSYFSGAFPICQKFKNMPNPERFDYRKKVANLTFQHKLRYAKNAVGKLINFMFDMGFDSDEIVRYLKADLGYPKGLEPEKYSLAGLKESLKFGFIHEQPDVDLEVELEELGIIKFKQSDKFDPDKRLFDPHHDVESERQYQLYLDRMYDLHANQN

SEQ ID NO: 2170 - protein, 73 aa, Neisseria
MSVANVIFSCSYWRIFKKSDYCVLCFYQFRHGEPHKLAEQENFSKLYQAFDYIDSVGSNFPVIITTDGCGLSS

SEQ ID NO: 2171 - protein, 185 aa, Neisseria
MDALKLLTNRRSSKKLKHPAPDAAELEQIFQAATQVPDHGNMRPFRFTVIQGEVGLQRFRDVLKQTVAELNFGDDAMKKAEKVGNMAPMVIGVTFAPNRDVPKPKPEWEQMLTAGCAAYALQLAATAQGFDNVWITGMWVNSPLLREAFGCADKDKIIGLMMVGTPTEEVHKPKNTDLEAFVSHW

SEQ ID NO: 2172 - protein, 544 aa, Neisseria
MIKPNLRPKLGSSALIAFLSLYSSLVLNYAFFAKVVELHPFNGTGADIFLYTMPVVLFFLSNFVFHVIALPFVHKVLIPLILVISAAVSYQEIFFNIYFNKSMLNNVLQTTAAESARLITPGYVLWIVCLGVLPALAYIAVKVKYRVWYKELLTRLVLAAVSFLCALGIAMLQYQDYASFFRNNKSVTHLIVPSNFIGAGVSKYKDWKRSNIPYTQLDMAVVQNRPAGSLRRFVVLVVGETTRAANWGLNGYSRQTTPLLAARGDEIVNFPQVRSCGTSTAHSLPCMFSTFDRTDYDEIKAEHQDNLLDIVQRAGVEVTWLENDSGCKGVCGKVPNTDVTSLNLPEYCRNGECLDNILLTKFDEVLNKNDKDAVLILHTIGSHGPTYYERYTEAERKFTPTCDTNEINKCTRATLVNTYDNTVLYVDQFIDKVIRKLENRDDLESVVHYVSDHGESLGENGMYLHAAPYAIAPSGQTHIPMVMWFSKAFRQHGGIDFQCLKQKAAENEYSHDHYFSTVLGLMDISNSQTYRKEMDILAACRRPR

SEQ ID NO: 2173 - protein, 109 aa, Neisseria
MSRCCLKRLQTASAVSAFSGGVLEVVRLCCRRLSVLFNPSVMLFVPDCPVGGAAGFFQYEMLCPFFWQGRLQTGSNLAYDVFMSAGRLNGGRNPPHSRRFLALLCSVAL

SEQ ID NO: 2174 - protein, 368 aa, Neisseria
MSLYPIYNFSAGPAVLPEAVLETARQEMLDYNGTGFPVMAMSHRSEMFLSILHHAEQDLRQLLKVPDNYKILFLQGGATTQFNMAAMNLAHGFRTADAVVTGNWSRIAYEQMSRLTDTEIRLAAHGGEQFDYLDLPPVETWDVAPDSAFVHFAVNETVNGLQYREVPCLSEGMPPLVCDMSSEILSREFDVADYGLIYAGAQKNIGPAGVTVVIVREDLLERCPNDIPDVFNYRSHINRDGMYNTPSTYAIYMSGLVFRWLQAQGGVKKIEAVNRLKAQTLYETIDGSDGFYINRIRPNARSKMNVVFQTGDEELDRRFVLEAELQGLCLLKGYKTVGGMRASIYNAMPLEGVRALADFMRDFQRRYG

SEQ ID NO: 2175 - protein, 149 aa, Neisseria
MYIGSSMDIQTILEKTLPGLGYELVDFELTAQGTLRVFIDKESGITVEDCATVSNHLSRVFMVEDIDYKNLEISSPGLDRPLKKAADFVRFAGQNAKIKTRLPIDGQKNFIGKIEGCENDTVTVSFDGKTVQIELGNIDKARLRPEFKF

SEQ ID NO: 2176 - protein, 500 aa, Neisseria
MSREMLQLAEALASEKNVDAEVVFQALEFALSTAAKKKADREHMDVRVQINRDTGEYQTFRRWLIVADEDYTYPDVEKTIEEIQEEIPGTTIQIGEYYEEQLPNEGFGRQAAQTAKQIILQRIRDAEREQNLNEFLAVKEDIVSGTVKRVERHGIIVEVVAGKLDALIPRDQMIPRENFRSGDRIRALFLRVEEIGNTGRKQVILSRTSGDFLVKLYANEVPEIADGMLEIRAVARDPGQRAKVAVKANDQRIDPQGTCIGVRGSRVNAVSNELSGERIDVVLWSPEPAQFVMSALSPAEVSRIVIDEDKHAVDVIVAEDQLALAIGRGGQNVRLASDLTGWQLNIMTSAEADERNAAEDAAIRRLFMDHLNVDEETADVLVQEGFATLEEVAYVPAAELLAIEGFDEEIVDMLRNRARDAILTMAIAAEEKLGEVSDDMRNLEGIDADMLRSLAEAGITTRDDLAELAVDELIEITGVNEETAKAVILTAREHWFTEDK

SEQ ID NO: 2177 - protein, 962 aa, Neisseria
MSNTTVEQFAAELKRPVEDLLKQLKEAGVSKNSGSDSLTLDDKQLLNAYLTKKNGSNSSTISIRRTKTEVSTVDGVKVETRKRGRTVKIPSAEELAAQVKAAQTQAAPVRPEQTAEDAAKARAEAAARAEARAKAEAEAAKLKAAKAGNKAKPAAQKPTEAKAETAPVAAETKPAEESKAEKAQADKMPSEKPAEPKEKAAKPKHERNGKGKDAKKPAKPAAPAVPQPVVSAEEQAQRDEEARRAAALRAHQEALLKEKQERQARREAMKQQAEQQAKAAQEAKTGRQRPAKPAEKPQAAAPAVENKPVNPAKAKKEDRRNRDDEGQGRNAKGKGGKGGRDRNNARNGDDERVRGGKKGKKLKLEPNQHAFQAPTEPVVHEVLVPETITVADLAHKMAVKGVEVVKALMKMGMMVTINQSIDQDTALIVVEELGHIGKPAAADDPEAFLDEGAEAVEAEALPRPPVVTVMGHVDHGKTSLLDYIRRTKVVQGEAGGITQHIGAYHVETPRGVITFLDTPGHEAFTAMRARGAKATDIVILVVAADDGVMPQTIEAIAHAKAAGVPMVVAVNKIDKEAANPERIRQELTAHEVVPDEWGGDVQFIDVSAKKGLNIDALLEAVLLEAEVLELTAPVDAPAKGIIVEARLDKGRGAVATLLVQSGTLKKGDMLLAGTAFGKIRAMVDENGKSITEAGPSIPVEILGLSDVPNAGEDAMVLADEKKAREIALFRQGKYRDVRLAKQQAAKLENMFNNMGETQAQSLSVIIKADVQGSYEALAGSLKKLSTDEVKVNVLHSGVGGITESDVNLAIASGAFIIGFNVRADASSRKLAENENVEIRYYNIIYDAINDVKAAMSGMLSPEEKEQVTGTVEIRQVISVSKVGNIAGCMVTDGVVKRDSHVRLIRNNVVIHTGELASLKRYKDDVKEVRMGFECGLMLKGYNEIMEGDQLECFDIVEVARSL

SEQ ID NO: 2178 - protein, 446 aa, Neisseria
MNKQPLSLAVVGHTNTGKTSLLRTLLRDSGFGEVKNAPSTTRHVEEAAISDGADTLVFLYDTPGLEDAGGVLEWLENHTDNRSDGIERLQQFLGSHGAHHDFNQEAKVLRQVLQSDMAMYVIDAREPVLDKYRDELTILSWCAKPVMPVFNFTGGQLPESWTTMLARRNLHVFAGFDTVAFDFEGELRLWENLATMLPERSTLDRLTAMRRREWQRLDGEARREIADFLIDAAAFRQEVDENEDTATVLQTMQAEIRQLERQMQQRLFALYRFYHSEIDGGDWMPQAFRQDPFDSELLKQYGIRTGTGAATGALIGLGLDIATLGGSLGLGTAIGGFLGGILPNTRTISDKLAGRQTLHTDPETLTLLAARALDLLHVLQTRGHAAQSDIELHSRKVPWDAARLPPELNKARSHWKWSSLNTHRPETSRAERREYAEKLGIRLAGK

SEQ ID NO: 2179 - protein, 446 aa, Neisseria; identical to SEQ ID NO: 100

SEQ ID NO: 2180 - protein, 208 aa, Neisseria
MYTGERFNTYSHLSGLILAAAGLALMLLKTIGHGDGYRIFSVSVYGISLLLLYLSSSLYHGIAAGKLKSILKKTDHCMIYVLIAGSYTPFALVSLRNGPGWTVFSLSWLLAAAGIAQELTIGRKSEKRLLSIVIYVVMGWMVLAVMKSLTASLPSAGLAWLAAGGMLYSVGIYWFVNDEKIRHGHGIWHLFVLGGSITQFVSVYGYVI

SEQ ID NO: 2181 - protein, 472 aa, Neisseria
MENILSVLVGTVNRFLWDYLLIYALLGIGLFFTLYLGAPQITKLGAGFKSVFGGLFAKGDKDDKSLSQFQALAVAISAQIGTGNVAGVATAITAGGPGAIFWMWVSAVLGMSTIFAEALLAQKYRVVSHGKYIGGPAFYITHGLTPKIGRGAARFLSGFFSIALIIALGFIGNATQANSIASAVTIAFDVPSLAVGIVLAVLAGMVVIGGVNRIANIAQFVVPFMAVVYILCAVVILFEFSDHIVPMFNHIFTAAFNPEAVLGGAAGIGMREAIRFGVARGLFSNEAGMGSTPHAHATADVKHPVQQGMAAFVGVFIDTILVCTATALIILLTDANLSGEQGAAVTQFAFNKAFPGFGSQLLAVCLTFFAFTTIIGWYYFGESNIRFLFRGRHLGIYRALVLLAIVLGTLGKVDLVWSLSDMFNGFMVIPNLIALFLLRKEIRAIYDDYLAQKKAGRDLSYQYEFHEFHDKG

SEQ ID NO: 2182 - protein, 242 aa, Neisseria
MAGHSKWANIQHKKARQDAKRGKIFTRLIKEITVAARMGGGDPGSNPRLRLALEKAAENNMPKDNVQRAIDKGTGNLEGVEYIELRYEGYGIGGAALMVDCLTDNKTRTVADVRHAFTKNGGNLGTDGCVAFNFVHQGYLVFEPGVDEDALMEAALEAGAEDVVTNDDGSIEVITAPNDWAGVKSALEAAGYKSVDGDVTMRAQNETELSGDDAVKMQKLIDALEDLDDVQDVYTSAVLNLD

SEQ ID NO: 2183 - protein, 162 aa, Neisseria
MTPLFRKAVWLLFAVSVCAFAGSLAAQYVLGMEPCVLCISQRLCVLATALCTAIVLMCRPRRRAGGLFGAVFISIPAVTGISVAAYQLWLQSLPPGTAPSCGAPWTFRLKGWPLFDWFEPVVRGFGNCAEPDYLLGIALPVWSVAYFLAVVLTVWWAWARAK

SEQ ID NO: 2184 - protein, 154 aa, Neisseria
MKELDKIDFRILKILQQNARIPMTELAEKVGLSTTPVTERVRRLEREHYISGYHAHLNPHLLGKPLLVFVELKLQSKSGNIFEDFKKEVLKIPQIMECHLVSGEYDYLIKVRLPDMSAYRDMLGNILLQLPAASESRSYVVMEEVKENPVLDLD

SEQ ID NO: 2185 - protein, 352 aa, Neisseria
MRPLNVQIRLGNLRHNYRILKEMHGGKLLAVVKADAYGHGAVRCAFALADLADGFAVATIDEGIRLRESGITHPIVLLEGVFEASEYEAVEQYSLWPAVGNQWQLEALLIRHWKKTVKVWLKMDSGMHRTGFFPHDYASAYAALKQSEYVDSIVKFSHFSCADEPESGMTEIQMEAFDLGTEGLEGEESLANSAAILNVPEARRDWGRAGLALYGISPFGGGDDRLKPVMRLSTRIFGERVLQPHSPIGYGATFYTSKSTRVGLIACGYADGYPRRAPSNSPVAVDGKLTRVIGRVSMDMMTIELDASQEGLGHEVELWGDTVNINTVAEAAGTIPYELMCNIKRAKFTYIE

SEQ ID NO: 2186 - protein, 451 aa, Neisseria
MSIQSGEILETVKMVADQNFDVRTITIGIDLHDCISSDINVLNQNIYNKITTVGKDLVTTAKYLSAKYGVPIVNQRISVTPIAQIAAATHADSYVSVAQTLDKAAKAIGVSFIGGFSALVQKGMSPSDEVLIRSIPEAMKTTDIVCSSINIGSTRAGINMDAVKLAGETVKRTAEITPEGFGCAKIVVFCNAVEDNPFMAGAFHGSGEADAVINVGVSGPGVVKAALENSDATTLTEVAEVVKKTAFKITRVGELIGREASKMLNIPFGILDLSLAPTPAVGDSVARILEEMGLSVCGTHGTTAALALLNDAVKKGGMMASSAVGGLSGAFIPVSEDEGMIAAAEAGVLTLDKLEAMTAVCSVGLDMIAVPGDTPAHTISGIIADEAAIGMINSKTTAVRIIPVTGKTVGDSVEFGGLLGYAPVMPVKEGSCEVFVNRGGRIPAPVQSMKN

SEQ ID NO: 2187 - protein, 90 aa, Neisseria
MNNSVITVIGKDRVGIVYDVSKILAENQINILNISQQLMDDFFTMIILVDTSKCSKSRQEVLDLFAEESKKLALDIRMQNEEIFQAMHRI

SEQ ID NO: 2188 - protein, 245 aa, Neisseria; identical to SEQ ID NO: 350

SEQ ID NO: 2189 - protein, 303 aa, Neisseria
MVHIMFNQAAQELTTIRDILRFAVSRFNEAGLFFGHGTDNAHDEAAYLILHTLNLPLDMLAPYLDAKLLEAEKEEVLAVIERRAVEHIPAAYLTHQAWQGEFDFYVDERVIIPRSFIYELLGDGLRPWIEYDELVHNALDLCTGSGCLAIQMAHHYPDAQIDAVDVSLDALEVAGINVEDYGLEERIRLIHTDLFEGLEGTYDLIVSNPPYVDAESVELLPEEYLHEPELALGSGADGLDATRQILLNAAKFLNPKGVLLVEIGHNRDVLEAAYPELPFTWLETSGGDGFVFLLTREQLLGEE

SEQ ID NO: 2190 - protein, 197 aa, Neisseria
MADGMGNLIGWEKTGLVVGKQWITAKDDKVSDVCNANGEMGVIGLYEPFSHGALTIPGHPNCRCEVVSVSGGELGEFAEKKELRKAAMQYARDNFIGKSYVNKNSGHELKVTWQGVKHAASKANQAELSIMTKLDDLLRYAKYEGSYSDRKGHPNIIAAHKYRAVAKVGNESLNIGVIVREFPDDHKHYDHFILKDE

SEQ ID NO: 2191 - protein, 205 aa, Neisseria
MVPRLPIPNRTVKRLSADDSVVLPCESRSLPNTHSENPRLFGGFCFARKKCLLCPEKMSVMAGRHPYGVRSGLRRNGLKLWDIHFRMTRFIVARCGLLFATLKGKTMKKMFVLFCMLFSCAFSLAAVNINAASQQELEALPGIGPAKAKAIAEYRAQNGAFKSVDDLTKVKGIGPAVLAKLKDQASVGAPAPKAPAKPVLPADKK

SEQ ID NO: 2192 - protein, 394 aa, Neisseria
MGKHILLGVTGSIAAYKSCELVRLLKKQGHSVTVVMSRSATEFVSPLTFQALSGNPVLTDTHGGNGSNGMEHINLTRNADVFLIAPASMNTVAKICNGVADNLLTSLAAARKCPLAIAPAMNVEMWLNPANQRNIAQLVSDGITVYMPGLGEQACGENGMGRMPEPAELLDLLPDLWTPKILKGKKVLITAGATFEAIDPVRGITNISSGKMGVALARACRAAGAEVSLIHGQLQTALPFGISDTVQAVSAENMHRAVHRLIDKQDAFISVAAVSDYRVKNRSTQKFKKDKNAKPLSIELDENPDILASIASLPNPPFCIGFAAETENVMTYAREKRIKKKLPMIVANDVSIAMGKPTNRITIIGDDGELSFPETSKDEAAMRIVERLAVYLSK

SEQ ID NO: 2193 - protein, 718 aa, Neisseria
MPAPQPSAPYDPLTAEARALLFHTASYLKPEEQAELEKAVAYAFRAHDGQTRKSGEPYITHPIAVATQLALWHMDIQGLCAGVMHDVLEDTGVTKGEMAAVFGNTIAEMVDGLSKLEKLKFEDHAEHQAESFRKLILAMTKDVRVIVVKLADRLHNMRTLGSMRPDKRRRIARETLEIYAQIANRIGLNNAYQELQDLSFQNLHPNRYETLKKAMDKSRKNRQDVVGKVLRAFGQRLVGANIEAKIKGREKNLYGIHQKMMAKKLRFAEVMDIYGFRVIVNSIPACYAALGALHTLYQPKPGRFKDYIAIPKSNGYQSLHTTLVGPYGLPIEVQIRTKEMDAVAEGGIAGHWSYKSYSKTVDQAVLHTNRWLKNILDLQASSANAIEFLEHVKVDLFPNEIYILTPKGKILTLPKGATPVDFAYAVHTDIGHKTVAARINNIMMPLRTKLKTGDSVEIITSEHAKPNPAWLNFAVSGRARSAIRQYIKNLNRHDAVVLGESLLQKALSSLLPKDVLLSDGIKEKYLADLNDKQTSFEEVLYNVGMGHTLPVYVAMHIAELAGEHFGSEVRLSSIKVDGQESGHIHFAECCHPVPGDSIRLLLVKGKGMIIHRDTCPTLLKSDPEQQLDADWENMNGQNYRVGLQVQSEDSHGLLALMAQAISDSGADIESVETPSKSQSGTEGFVEFKFLLKVKNLNQLNQIIQNLHSIPYIRKVIRS

SEQ ID NO: 2194 - protein, 68 aa, Neisseria
MARITTEDCTGKISNHFDLTLVAARRARQLENGNTPLVDDVRNNKPTVTALREIAAGHIGTELLTRNK

SEQ ID NO: 2195 - protein, 205 aa, Neisseria
MSAYRKGNIFIISAASGTGKTTLVSRLLANHNGLRVSVSHTTRPPREGEANGVHYHFVSKEEFESLIAQEAFLEYADVFGNYYGTGAEGVNALAAAGYDVILEIDVQGAAQVRDALPEAVGIFILPPSFDVLAARLNGRGTDSREVIQRRLSKARHEIEQSVLFDFVVVNDDLARAEEDLRHIVNACRLKRSRQLGFIADLLENS

SEQ ID NO: 2196 - protein, 188 aa, Neisseria
MLVHPEAMSVGALADKIRKIENWPQKGILFHDITPVLQSAEYFRLLVDLLVYRYMDQKIDIVAGLDARGFIIGAALAYQLNVGFVPIRKKGKLPFETVSQSYALEYGEAAVEIHTDAVKLGSRVLLVDDLIATGGTMLAGLELIRKLGGEIVEAAAILEFTDLQGGKNIRASGAPLFTLLQNEGCMKG

SEQ ID NO: 2197 - protein, 262 aa, Neisseria
MNPKIVFFDIDDTLYRKYTDTLRPSVKTAVAALRGKGILTALATGRSLATIPEKVRDMMAEAGMDAVVTINGQFALLHGKTVREVPMDAGLMGRVCAHLDGLGMDYAFVGGEGIAVSALSECVCRALKHIASDFFADKDYFSSKPVYQMLVFAEENEMPLWSDIVEREGLKTVRWHEEAVDLLPAGASKTDGIRSVVEALGWEMADVMAFGDGLNDVEMLSEVGFGVAMGNGEQAAKEAAKYVCPSVDEDGVLRGLQDLGVI

SEQ ID NO: 2198 - protein, 451 aa, Neisseria
MKAPELLLPAGGLERMRAAYDYGADAVYAGSPRYSLRARNNEFAKLDVLEQGIKEAHERNKKFFLTVNTLPHNSKLKTFVADMEPLIAMKPDALIMADPGLIMTVREKWPEMPIHLSVQANTTNYWGVKFWQNIGVERIILSRELSMEEIAEIRQECPDIELEVFIHGALCIAYSGRCLLSGYFNHRDPNQGTCTNSCRWDYKVHNATESDAGDAQLLQGFNFEKAQEEANQNFEGINGQKRHPYADKVFLIEESNRPGEMMPIMEDEHGTYIMNSKDLRGIEVVEKLAKIGVDSLKVEGRTKSLYYVARVAQSYRKAIDDAVAGRPFDYSLLSELEGLANRGYTSGFLERHQTQDYQNYLTGHSTAKQSQYVGHVTEIDENGWATVEVKNRFAVSDSLEIIHPSGNQTIKLEQMTRKGQPVDVAPGNGIQVKIPNMQGKEKALIARVLNP

SEQ ID NO: 2199 - protein, 128 aa, Neisseria
MRKILLDTHALLWWLLDDKKLGISARKLIENPRNAIFVSAASIWEISIKQNKGLLKLPEEFFDVLQEEDFEMLPIGLFHAKQAGSLPEIHKDPFDRMLIAQTQAEGFELMTVDEYIPQYGIRVVNASS

SEQ ID NO: 2200 - protein, 82 aa, Neisseria
MFQANIHQAKTNLSQLIQRAEAGEIVIIAKAGKPCVQLIGIEKPARNAGRLKKFSHMENTDISRILEDDNETAALFFEESAL

SEQ ID NO: 2201 - protein, 68 aa, Neisseria
MPSEKCFRRHFLVADMLTDDVGAHDHADVERACLTVVLSALQRLLVEVAVEAGNAASARVAADAALCL

SEQ ID NO: 2202 - protein, 791 aa, Neisseria
MKPLQMLPIAALVGSIFGNPVLAADEAATETTPVKAEIKAVRVKGQRNAPAAVERVNLNRIKQEMIRDNKDLVRYSTDVGLSDSGRHQKGFAVRGVEGNRVGVSIDGVNLPDSEENSLYARYGNFNSSRLSIDPELVRNIEIVKGADSFNTGSGALGGGVNYQTLQGRDLLLDDRQFGVMMKNGYSTRNREWTNTLGFGVSNDRVDAALLYSQRRGHETESAGNRGYAVEGEGSGANIRGSARGIPDSSKHKYHSFLGKIAYQINDNHRIGASLNGQQGHNYTVEESYNLTASSWREADDVNRRRNANLFYEWMPDSNWLSSLKADFDYQKTKVAAVNNKGSFPMDYSTWTRNYNQKDLDEIYNRSMDTRFKRFTLRLDSHPLQLGGGRHRLSFKTFVSRRDFENLNRDDYYFSGRVVRTTSSIQHPVKTTNYGFSLSDQIQWNDVFSSRAGIRYDHTKMTPQELNAECHACDKTPPAANTYKGWSGFVGLAAQLNQAWRVGYDITSGYRVPNASEVYFTYNHGSGNWLPNPNLKAERSTTHTLSLQGRSEKGMLDANLYQSNYRNFLSEEQKLTTSGTPGCTEENAYYGICSDPYKEKLDWQMKNIDKARIRGIELTGRLNVDKVASFVPEGWKLFGSLGYAKSKLSGDNSLLSTQPLKVIAGIDYESPSEKWGVFSRLTYLGAKKVKDAQYTVYENKGWGTPLQKKVKDYPWLNKSAYVFDMYGFYKPAKNLTLRAGVYNLFNRKYTTWDSLRGLYSYSTTNAVDRDGKGLDRYRAPGRNYAVSLEWKF

SEQ ID NO: 2203 - protein, 209 aa, Neisseria
MSETENQALTFAKRLKADTTAVHDSVDNLVMSVQPFVSKENYIKFLKLQSVFHKAVDHIYKDAELNKAIPELEYMARYDAVTQDLADLGDKPYEYGKPLPHETGNKAIGWLYCAEGSNLGAAFLFKHAQKLDYNGEHGARHLAPHPDGRGKHWRAFVEHLNALNLTPEAEAEAIQGAREAFAFYKVVLRETFGLAADAEAPEGMMPHRH

SEQ ID NO: 2204 - protein, 503 aa, Neisseria
MFLSRYFTILYRIGILSNGFGSRRTTAQKIFLPDTKGLFILPNLPVLHPDWVYRLFSFIMPPLIFATFPMKPFAENIPHSLRGNCCDEALPPHTVDCPECGCRADVPRLDSGEAAFCPRCGHKLFRVGRHPFSAPPAYAAASLILMAFAYGMTYIEVGIPGAASVLSLPEMMRLMVFQDYGFLAEVMFVLTFGAPVLFLLLCLYVYAALIRKQAYPALRLATRVMVRLRQAMMVDVFFVSTLVAYIKLSSVAEVRFGPAFYLMFALSVMLIRTSVSVPQHWVYFQIGRLTGDNAVQTASEGKTCCSRCLYFRDSAESPCGVCGAELYRRRPKSLSISSAFLTAAVILYFPANILPIMISSNPAATEVNTILNGIAYMWDEGDRLIAAVIFSASILVPVLKIAAMSVLIASARFALPTGAKKLSHLYRITEAVGRWSMIDIFVIIILMCSFHTYAARVIPGSAAVYFCLVVILTMLSAYYFDPRLLWDKRASDGIAFNETEKHD

SEQ ID NO: 2205 - protein, 553 aa, Neisseria
MTDNSPPPNGHAQARVRKNNTFLSAVWLVPLIALIAGGWLWVKEIRNRGPVVTLLMDSAEGIEVNNTVIKVLSIDVGRVTRIKLRDDQKGVEVTAQLNADVSGLIRSDTQFWVVKPRIDQSGVTGLGTLLSGSYIAFTPGKSDEAKDVFQVQDIPPVTAIGQSGLRLNLIGKNDRILNVNSPVLYENFMVGQVESAHFDPSDQSVHYTIFIQSPNDKLIHSASRFWLESGINIETTGSGIKLNSAPLPALLSGAISFDSPKTKNSKNVKSEDSFTLYDSRSEVANLPDDRSLYYTAFFKQSVRGLTVGSPVEYKGLNVGVVSDVPYFDRNDSLHLFENGWIPVRIRIEPSRLEINADEQSKEHWKQQFQTALNKGLTATISSNNLLTGSKMIELNDQPSASPKLRPHTVYAGDTVIATQGGGLDDLQVKLADLLDKFDKLPLDKTVAELNGSLAELKSTLKSANAALSSIDKLVGKPQTQNIPNELNQTLKELRTTLQGVSPQSPIYGDVQNTLQSLDKTLKDVQPVINTLKEKPNALIFNSSSKDPIPKGSR

SEQ ID NO: 2206 - protein, 172 aa, Neisseria
MRLFPIAAALSLAACGTVQSTQYFVLPDSRYIRPATQGGETAVEVRLAEPLKRGGLVYQTDPYRLNTAQNHVWADTLDDMLEAALSNAFNRLDSTRIFVPASRSGSTEKWTVYIDAFQGSYTGKTLISGYAVLPDGTNRPFHIETEQQGDGYAAMTAALEQGLKQAAQQMVE

SEQ ID NO: 2207 - protein, 183 aa, Neisseria
MNYCEFAASLPENTDNPNKHYHDTQYGFPIEDDNELFERLVLEINQAGLNWTLMLKKRQAFQTAFEGFDIDTVAAFDDTDRERLLADAGIVRNRLKIDAAIFNARQIQALQQEYGSFKNWLDTHHPRSKDEWVKLFKKHFKFVGGEIVGEFLMSTGYLKGAHAESCPVYRETLKYHPKWLDAI

SEQ ID NO: 2208 - protein, 213 aa, Neisseria
MPSEKPMNRRTFLLGAGALLLTACGRKSARTHAKIPEGSTVLALGDSLTFGYGANPGESYPAQLQKLTGWNIVNGGVSGDTSAQALSRLPALLARKPKLVIVGIGGNDFLRKVPKEQTRANIAKIIETVQKENIPAVLVGVPHITLGALFGHLSDHPLYEDLSEEYGIPLFGGAWAEILGDNNLKSDQIHANGKGYRKFAEDLNQFLRKQGFR

SEQ ID NO: 2209 - protein, 102 aa, Neisseria
MEYCEPEEASDPYATYRRANLMAGLPLFVVILVLLNIVFPLPAHPLAWLVPAGFMVLGGGFPLSLPLVALLVLTCCILAHCPPLSRLLCYPCPNHPMSKNSA

SEQ ID NO: 2210 - protein, 279 aa, Neisseria
MKQLRDNKAQGSALFTLVSGIVIVIAVLYFLIKLAGSGSFGDVDATTEAATQTRIQPVGQLTMGDGIPVGERQGEQIFGKICIQCHAADSNVPNAPKLEHNGDWAPRIAQGFDTLFQHALNGFNAMPAKGGAADLTDQELKRAITYMANKSGGSFPNPDEAAPADNAASGTASAPADSAAPAEAKAEDKGAAAPAVGVDGKKVFEATCQVCHGGSIPGIPGIGKKDDWAPRIKKGKETLHKHALEGFNAMPAKGGNAGLSDDEVKAAVDYMANQSGAKF

SEQ ID NO: 2211 - protein, 397 aa, Neisseria
MYRHIEYYPGDPILSLVETFKNDPRPEKVNLSIGIYFDDEGKMPVLESVSRAETARAAAPAPSPYLPMEGLDTYRSAVQHLLFGKDNPALAQGRIVTVQTLGGSGALKVGADFLHRWFPEARAYVSDPTWDNHRGIFEGAGFEVGTYPYYDPATVGVKFDEMTAFFNTLPENSVLILHPCCHNPTGVDMSERQWDEVLHIIKTRKLIPFMDIAYQGFGGDLDSDAYAVRKAVEMELPLFVSNSFSKNLSLYGERVGGLSVVCPNKEEADLVFGQLKFTVRRIYSSPPAHGAYIAADVMNSPELYALWQNEVYMMRDRIRAMRQKLYDVLTAQIPNRDFTYFIKQRGMFGYTGLSVEQVRRLRDEFAVYLLDSGRMCVAGLNTSNTDYVARAFAEVLK

SEQ ID NO: 2212 - protein, 362 aa, Neisseria
MNDYTQQLQGKKDYLKTLFAGLDVPEWEVYESPDKHYRMRAEFRIWHEGGEMFYAMFEKGQKASGASMIRCDRFEAASEAVNRLMPELIAAAAQSPELKKRWYAVEFLSTLSGEMLVTMIYHKRLDAEWMQAAQALQQQLDISVIGRSRGQKIVLKQDYVTETLKVGNRDFRYRQIEGSFTQPNAAVCQKMLEWACRTAEGLGSDLLELYCGNGNFTLPLSRYFRQVLATEISKTSVSAAQWNIEANRIGNIKIARLSAEEFTEAYTGKREFKRLKDGGIALTDYAFSTIFVDPPRAGIDEETLKLVSQFDNIIYISCNPETLRANLDTLAETHAVERAALFDQFPFTHHIESGVLLKKKIL

SEQ ID NO: 2213 - protein, 508 aa, Neisseria
MAGNTFGQLFTVTTFGESHGAGLGCIIDGCPPGLELSEADIQFDLDRRKPGTSRHVTQRREADQVEILSGVFEGKTTGTPIALLIRNTDQRSKDYGNIATSFRPGHADYTYWHKYGTRDYRGGGRSSARETAARVAAGAVAKKWLKEKFGTEITAYVTQVGEKEIRFEGCEHISQNPFFAANHSQIAELENYMDSVRKSLDSVGAKLHIEAANVPVGLGEPVFDRLDAEIAYAMMGINAVKGVEIGAGFDSVTQRGSEHGDELTPQGFLSNHSGGILGGISTGQDIRVNIAIKPTSSIATPRRSIDINGNPIELATHGRHDPCVGLRSAPIAEAMLALVLIDHALRHRAQNADVQVNTPDITLSNKVMTQETALGAALKSAVQTMSKKKQTEMIADHIYGKYDVFKRFKPLALGIDQDLIAALPQYDAALIARVLANHCRRPRYLKALARGGKRFDLNNRFKGEVTPEEQAIAQNHPFVQQALQQQSAQAAAETLSVEAEAAESSAAE

SEQ ID NO: 2214 - protein, 661 aa, Neisseria
MAKNNQYSESSITVLKGLEPVKERPGMYTRTDSPTHICQEVIDNASDEALGGFATAIDVQIHEDGSLSVHDNGRGIPVGLHPEEGVSVVELVFTRLHAGGKFNKKDGGSAYAFSGGLHGVGVSVTNALSTRLEVTVKREGKIHRIVFAGGDVVEPLAQVGKCAVKDSGTEVRVWPDGKYFESPNYSIPELERLLRAKAVLLPGVRVSLTRPVKGEDEAHTQTWHYPDGLKSYLTDLIADAQEAVPLFSCENYISDEHNGDFSIGEGAAFALTWLEEGSCANESYVNLIPTPLGGTHEAGLKQAVFNAVNNFINLHNLLPRGVKVQSDDVFGKTAFVLSARVLDPQFQGQTKDKLTNRDALKLVATVSGDPLELWLNQNVDFGKKIAELAIRQAQARMRSVKKIEKKKGSGVAVLPGKLTDCESEDIRENELFLVEGDSAGGSAKLARDKATQAILPLRGKVLNSFEVHPDQLFGNAEIHDISVAIGVDPHGINDHPDLSGLRYGKIAILSDADVDGSHIQVLLLTLFYRHFPKLVADGHIYVAQPPLFRVDVNAQGKSKPARKFYALDQNELDSILERLQKEGVKETAYSISRFKGLGEMNPDQLKDTTMHPDTRRLLQVQIPEGADDETRDIFVKLMGKGEAAARRAWMEREGDTAELDI

SEQ ID NO: 2215 - protein, 174 aa, Neisseria
MLDREGYRPNVGIILINNRNEVFWGKRVREHSWQFPQGGIKPGESPETAMYRELYEEVGLLPQHVKIIGRTRDWLRYDVPNNWVRREWRGSYRGQKQIWYLLRLTGRDCDVNLRATRHPEFDGWRWHQYWAPVDEVIDFKRDVYLGALKELSSRFLRGMESYEDFAARQSSDNR

SEQ ID NO: 2216 - protein, 431 aa, Neisseria
MLDIQLLRSNTAAVAERLARRGYDFDTARFDTLEERRKSVQVKTEELQASRNSISKQIGALKGQGKHEEAQAAMNQVAQIKTDLEQAAADLDAVQKELDAWLLSIPNLPHESVPAGKDETENVEVRKVGTPREFDFEIKDHVDLGEPLGLDFEGGAKLSGARFTVMRGQIARLHRALAQFMLDTHTLQHGYTEHYTPYIVDDTTLQGTGQLPKFAEDLFHVTRGGDETKTTQYLIPTAEVTLTNTVADSIIPSEQLPLKLTAHSPCFRSEAGSYGKDTRGLIRQHQFDKVEMVQIVHPEKSYETLEEMVGHAENILKALELPYRVITLCTGDMGFGAAKTYDLEVWVPAQNTYREISSCSNCEDFQARRLKARFKDENGKNRLVHTLNGSGLAVGRTLVAVLENHQNADGSINIPAALQPYMGGVAKLEVK

SEQ ID NO: 2217 - protein, 332 aa, Neisseria
MKIAIYGTKSYDREHFTRANRHFGFELEFFDFMLDAKTAKMAEGAEAVCIFVNDDGSRPVLEKLAQIGVKTVALRCAGFNNVDLKAAEELGLKVVRVPAYSPESVAEHTVGLMLTLNRRIHKAYQRTRDANFSLEGLTGFNMYGKTAGVIGTGKIGIATMRILKGFGMNLLAYDPFCNPEAEKIGGKYVDLDELYARSDIITLHCPATPENHYMLNEAAFDKMKDGVMIINTSRGGLIDSAAAIEALKRRKIGALGMDVYENERELFFEDKSNDVITDDVFRRLSSCHNVLFTGHQAFLTEEALGNISEVTLSNIREVGQTGDCGNAVRADG

SEQ ID NO: 2218 - protein, 358 aa, Neisseria
MKPSILEKLQQLSDRLEEVTHLLGQPEATSDMDNYRKLTREHAELTPVVEVFQNYRLAQSDLADAEEMLSDPEMKDFAAEEIEAAKAKIGELDTELQKLLLPKDADDDKNIFIEIRAGTGGDEAALFAGDLLRMYSRYAERNRWQVEIVSANESELGGYKEVIARIVGLGAYSRLKFESGGHRVQRVPATESQGRIHTSACTVAVMPEADELEDIELNPADLRIDTFRASGAGGQHINKTDSAVRITHLPTGMVVECQDGRSQHANKAQAMKVLAARLNDAQKREAQAKEAAERKSLIGSGDRSERIRTYNYPQGRVTDHRINLTLHKLDFVMDGDLEEITNALIAEHQAELLAAMGD

SEQ ID NO: 2219 - protein, 256 aa, Neisseria
MNFTDTHCHLADPALRENLPHILTAARKVGVKRFIVPATRPQDWQDVADLAEMPSEHGQIRIALGIHPWFSDGIAERDFVRLETMLAHYPQAWVGEIGLDFYDKTQTSQQRERQIQVFVRQLEIAQTLRRRVIIHNLKATADIAAAVKQTGFAQGGIVHAFSGSAEEARVLTKLGFKIGIGSLLLNPNARKVRDTLKALNDGDFVLETDSPFMLKKEINTPANIPGIAKIAAEIRGTCVEEIAKVTERNADALLGR

SEQ ID NO: 2220 - protein, 333 aa, Neisseria
MMSMKQKIFVLYTGGTIGMTQSSEGLRPDTALVSQALSPFSDGLDFEWHVCNPLIDSSSVTLQHWRDWLDIIADKLPSCDGILILHGTDSMAYTANLLALALQGLGKPIVLTGSQWPYAAENSDAPRNLSTAVAAFSLKLKQTVIAFDGKLYPAVGSSKVSTETAAGFDNPHFGTLAEWDETRGWHNLRLPSQDAAAVSDGLKIRYPDPQAKIAVRTLIPGFAVQELADGLGQLPAQALILQSYGHGNTPADEGFIRAVRDFARQGKLLLNISQVRQGKTAAVYAQGNAFRNSGIINGGKCNLETATALMTLAVSQGWGKEDVYKELVRLKLV

SEQ ID NO: 2221 - protein, 227 aa, Neisseria; identical to SEQ ID NO: 361

SEQ ID NO: 2222 - protein, 444 aa, Neisseria
MAKKYFGTDGVRGEVGQFPITPDFVLKLGYAAGQVLVQHDTDQKPTVLIGKDTRISGYMLEAALVAGFTAAGVNVVQTGPLPTPGVAYLTRALRLSAGVMISASHNAYSDNGIKFFAEGGVKLSDEVELEIEAKIDGEMKTQPSARLGRARRISGADDRYIEFCKSTFPSHSDLRGLKLVVDTANGAGYGVAPKVFHELGAQVVSIGNEPNGYNINEKCGATYTKTLQAAVLQHEADYGIALDGDGDRLMMVDKNGQVYDGDSLIYVIAKARAREGINIGGVVGTVMTNMAMEIALKEQGVDFCRAKVGDRYVLEQLNQRGWLIGGEASGHILCMDKHNTGDGIISALQVLAALQTLNQDLATVCADWQPYPQTMINVRIQKGQQWQEASKDVLAEVEKELEGKGRVVLRASGTEPVVRVMVEARQADWAREGAERIAAAIGGI

SEQ ID NO: 2223 - protein, 285 aa, Neisseria
MARHVWQAGRFEIGLDKPKIMGIVNLTPDSFSDGGVYSQNAQTALAHAEQLLKEGADILDIGGESTRSGADYVSPEEEWARVEPVLAEVAGWGVPISLDTRRTVIMEKALALGGIDIINDVAALNDEGAVELLARQADTGICLMHMQGLPKTMQINPKYQDVVGEVARYLKARSAECIAAGIAPQRIILDPGFGSGFGKPLQHNIALMRHLPELMAETGFPLLIGVSRKSTIGELTGEANAAERVHGSVAAALASVARGAQIVRVHDVKATADALKVWEALGINL

SEQ ID NO: 2224 - protein, 297 aa, Neisseria
MIIVMSRRAAEADIAGVVAFIRSRGLREHISHGDERTVIGAIGDDRVLSVREVQTLPEVEKAVRILDTWKTVSRENRAEDSRVAAKGVAFGGGETVRIAAEPSVWRNADAVFLDPFFTSANLYDTSSADEGRGRCRRLAEQTASAHDAGKPVLVRVRNVRHVEAALNAGADILYLGGGLMSDLAVLNEAGNLNIPLVLCKDKHHSAEDWLNAAEYVVSRGNRHLILGESGVLNHTKGHPYRLDVESIVKVRQISHLPVIANITGLWNRDMPQEILYGLAKAAGACGIVGTCFEKSGG

SEQ ID NO: 2225 - protein, 704 aa, Neisseria
MDLLSVFHKYRLKYAVAVLTILLLAAVGLHASVYRTFTPENIRSRLQQSIAHTHRKISFDADIQRRLLPRPTVILKNLTITEPGGDQTAVSVQETKIGLSWKNLWSDQIQIEKWVVSSAELALTRDGKGVWNIQDLIDSQKRQASVNRIIVENSTVRLNFLQEQLILKEINLNLQSPDSSGQPFESSGILVWGKLSVPWKSRGLFLSNGIGPPEISPFHFEASTSLDGHGITISTTGSPSVRFNAGGADAAGLGLRADTSFRNLHLTAQIPALALRNNSIKIETVNGAFTAGGEYARWDGSFKLDKANLHSGIANIGNAEISGSFKTPRHQTNFSLNSPLVWTENKGLDAPRLYVSTLQDTVNRLPQPRFISRLDGSLSVPNLQNWNAELNGTFDRQTVAAKFRYTHEDAPHLEAAVALQKLNLTPYLDDVRQQNGKIFPDTLAKLSGDIEAHLKIGKVQLPGLQLDDMETYLHADKGHIALSRFKSGLYGGHTEGGISIANTRPATYRLQQNASNIQIQPLLQDLFGFHSFSGNGDAVIDLTAGGETRKELIRSLQGSLSLNISNGAWHGIDMDNILKNGISGKTADNAAPSTPFHRFTLNSEISDGISRHIDTELFSDSLYVTSNGYTNLDTQELSEDVLIRNAVHPKNKPIPLKITGTVDKPSITVDYGRLTGGINSRKEKQKILEDTLLEQWQWLKPKEP

SEQ ID NO: 2226 - protein, 494 aa, Neisseria
MNMKYKDLRDFIAMLEQQGKLKRVAHPISPYLEMTEIADRVLRAEGPALLFENPIKPDGTRYGYPVLANLFGTPERVAMGMGADSVSKLREIGQTLAYLKEPEPPKGIKDAFSKLPLLKDIWSMAPNVVKNAPCQEIVWEGEDVDLYQLPIQHCWPEDVAPLVTWGLTVTRGPHKKRQNLGIYRQQLIGKNKLIMRWLSHRGGALDYQEFRKLNPDTPYPVAVVLGCDPATILGAVTPVPDTLSEYQFAGLLRGSRTELVKCIGNDLQVPARAEIVLEGVIHPNETALEGPYGDHTGYYNEQDYFPVFTVERITMRENPIYHSTYTGKPPDEPAVLGVALNEVFVPLLQKQFPEITDFYLPPEGCSYRMAVVSMKKQYAGHAKRVMMGCWSFLRQFMYTKFIIVVDDDVNVRDWKEVIWAVTTRMDPVRDTVLVENTPIDYLDFASPVSGLGGKMGLDATNKWPGETDREWGRVIKKDPAVTAKIDGIWEELGL

SEQ ID NO: 2227 - protein, 326 aa, Neisseria
MELQQRTLTIGLGNDIAVQTEGVGFIRGQLVADHAEINSVFKVVVKAALIVVKTLFADGYPHAIFQRFLMPDNRNRQHRADKAVGLVGIADDAEIRIAFCLISNAFFFTELIIGIGCGKADCGHFFVVFAAGSASVHKVSDFQNEFAVKPFAGKQHPHQYIGNHAGINRPPIISPQPCQQSGKRPVDYKKYAPNLRYPAGIAHGFFRQVGLLQPRKFFNHRLPGKQAAAEHRQHHQIDEDGIPIHRIMPPEHQYCGKKQCNKQSRITLLGQFGSQGAQQPQPAHRRRQPNKPARLPAVYSGLTKTSTALPRLAVLSAASSPCPDFC

SEQ ID NO: 2228 - protein, 81 aa, Neisseria
MTEQEIYRLLRDTLTELFEIEPERITPDTNLYEDLEIDSIDAIDLIDRIKRETGRKLQAEDFRNVRTVNDVVQAVLKIQAG

SEQ ID NO: 2229 - protein, 86 aa, Neisseria
MNDLENQIKQLIIDSLALEDITAADIGSEDALFGDGGLGLDSVDALELGLAVQKHFGFRLDGEQENLREHFANVKTLAAFVKSRQA

SEQ ID NO: 2230 - protein, 252 aa, Neisseria
MDKLDYCRRFFATWLGFVIFGVGGIMMKLVLLPYTLNGTSGSVARQLAARRIIGTSWRLFVAYLKWSGVLEVSFKGVEKLNRPGQLILANHPSLLDVVLLVGHVPEMNCIVKKDLQHNPAMSSQIKGAGYIPNEESEAMLETVKAVFDSGQSLLVFPEGTRTGWDGRVKMHRGAVSLGLRYAEVITPVCIKMNPPNFKKGQPWYRIPPKRIRYEITVGDDILPQDWLAEKPLPIAARRLNEYLQDYFTRKTI

SEQ ID NO: 2231 - protein, 121 aa, Neisseria
MSEQTALAVCADGVETALAEAASLLEEGCGSVLVLAADDPLPEGYAVSATRAPFAYALAMVLTKGTRYSLTLSASDDMPSEAGMLPEAYWSGLEWVRFLLNGSRECRRVYRNREWLWQRNG

SEQ ID NO: 2232 - protein, 121 aa, Neisseria
MGGGNVPSRVAYQTRRLTQTAALHSGQERQFRPDIGQTVGKIRTFRPFCPLGHIAHFAARNPPGGDVEVEPANNRRHSFFQKFTLCRILTKAYPPDNAEIQTHFCPLSPTTPPLGKPPELA

SEQ ID NO: 2233 - protein, 166 aa, Neisseria
MDTLPECPITNTASLLPHSGRMVLIDRITRYGDDFVEAGAQVSPNHILLLDDKLPYTAFIELMAQAVGAYAGIQARKNARSVRLGFLLGTRKLEIFAQSVPIGTHLLATAHMSIQDAGGMGVFDCELRWTDAPETSSETLPSDGILARASLNVYSPEHPAGTTDAV

SEQ ID NO: 2234 - protein, 242 aa, Neisseria
MTETVLITGSNRGIGKAVAFGLAEDGFDIAVHCRSRRDEAEAVAEEIRALGRNARVLQFDVSDREACREILTADIEANGAYYGVVLNAGLTRDNTFPAFSDDDWDVVLRTNLDGFYNVLHPLVMPMIRRRKAGRIVCMASVSGLTGNRGQVNYSASKAGIIGAAKALAVELAKRKITVNCVAPGLIDTDIIDENVPVEEILKAVPAALMGLPEEVAHAVRFLMDEKAAYITRQVIAVNGGLC

SEQ ID NO: 2235 - protein, 416 aa, Neisseria
MLNTRRVAVTGIGGITAFGRDWQSIQAAFKAEKNAVKYMDWHERFPELEAQLGAPIENYAPPKHWTRKQLRSMGRVSYLCVDAAEQALADAGLLGDESITDGRMGVACGSSSGSTKDIGDVGELLLTGTSRNFSANTYVRMMPHTTAANIGIFFGLKGRIIPTSSACSSGSQGIGYAYEAIKYGLTDMMLAGGGEEFFPSEVYVFDSLYAASRRNGEPEKTPRPYDANRDGLVIGEGAGIFVLEELEHAKRRGAIIYAELVGYGANSDAYHISTPRPDAQGAILAFQTALQHANLAPEDIGWINLHGTGTHHNDNMESRAVAAVFGNNTPCTSTKPQTGHTLGAADAIEAAFAWGIADRQSNPEGKLPPRLWDGQNDPNLPAINLTGSGSRWETEKRITASSSFAFGGSNCVLIIG

SEQ ID NO: 2236 - protein, 252 aa, Neisseria
MKKVSVLIVAKNEANHIQECIESCRFDKEVIVIDDYSTDNTAEIAEGLGAKVFRRHLNGDFGAQKTFAIEQAGGEWVFLIDADERCTPELSDEISKIVQTGDYAAYFVERRNLFPNHPATHGAMRPDSVCRLMPKKDSSVQGKVHETVQTPYPKRRLKHFMYHYTYDNWEQYFNKFNKYTSISAEKYREQGKPVRFVRDIILRPIWGFFKIYILNKGFLDGKMGWIMSVNHSYYTMIKYVKLYYLYKSGGKF

SEQ ID NO: 2237 - protein, 354 aa, Neisseria
MEKEFRILNIVSAKIWGGGEQYVYDVSKALGLRGCTMFTAVNKNNELMHRRFSEVSSVFTTRLHTLNGLFSLYALTRFIRKNRISHLMIHTGKIAALSILLKKLTGVRLIFVKHNVVANKTDFYHRLIQKNTDRFICVSRLVYDVQTADNPFKEKYRIVHNGIDTGRFPPSQEKPDSRFFTVAYAGRISPEKGLENLIEACVILHRKYPQIRLKLAGDGHPDYMCRLKRDVSASGAEPFVSFEGFTEKLASFYRQSDVVVLPSLVPEAFGLSLCEAMYCRTAVISNTLGAQKEIVEHHQSGILLDRLTPESLADEIERLVLNPETKNALATAAHQCVAARFTINHTADKLLDAI

SEQ ID NO: 2238 - protein, 56 aa, Neisseria
MQQTTKLYSFIGKKHPEFILQNKKIPISPDITQPIGKVLQRLPRLVLPRQVLCYNV

SEQ ID NO: 2239 - protein, 445 aa, Neisseria
MSNHTSWSSKIGFVLAAAGSAIGLGAIWKFPYTAGTNGGAVFFLLFLIFTILVALPVQLAEFYIGRTGGKNAVDSFRVLRPGTQWLWVGRMGVAACFILLSFYSVVGGWVLNYVVHSFTGAVHTGADFEALFGATISNPAGSLSYQALFMLITVWVVKGGISDGIEKANRYLMPGLFILFIALAIRSLTLPGAMEGVSFLLKPNWSYFKADTMITALGQAFFALSIGVSAMITYASYLGKDQDMFRSGHTIMWMNLLVSLLAGLVIFPAVFAFGFEPSQGPGLIFIVLPAVFMKMPFGTVLFAVFMLLVVFATLTSAFSMLETVIASTIRQDERKRKKHTWLIGTAIFIIGIPSALSFGVWGEFKVFGKTIFDLWDYVISAVIMPIGALSVSIFTAWIQDKQSVLKDAGAGSTVPRAVLLLWLNTLRYLAPIAIIIVFINSLDIL

SEQ ID NO: 2240 - protein, 264 aa, Neisseria
MKAYLDLMRHVLDNGTDKSDRTGTGTRSVFGYQMRFDLGKGFPLLTTKKLHLRSIIHELLWFLKGDTNIKYLKDNNVSIWDEWADENGDLGPVYGYQWRNWPAPDGRHIDQIANVLEQIKKNPDSRRLIVSAWNPALVDEMALPPCHALFQFYVADGKLSCQLYQRSADIFLGVPFNIASYALLTMMMAQVCGLEAGEFVHTFGDAHLYRNHFEQAALQLEREPRALPVMKINPEVKDLFSFKFEDFELEGYDPHPHIKAAVSV

SEQ ID NO: 2241 - protein, 444 aa, Neisseria
MTDLNTLFANLKQRNPNQEPFHQAVEEVFMSLDPFLAKNPKYTQQSLLERIVEPERVVMFRVTWQDDKGQVQVNRGYRVQMSSAIGPYKGGLRFHPTVDLGVLKFLAFEQVFKNALTTLPMGGGKGGSDFDPKGKSDAEVMRFCQAFMTELYRHIGADTDVPAGDIGVGGREIGYLFGQYKKIRNEFSSVLTGKGLEWGGSLIRPEATGYGCVYFAQAMLQTRNDSFEGKRVLISGSGNVAQYAAEKAIQLGAKVLTVSDSNGFVLFPDSGMTEAQLAALIELKEVRRERVATYAKEQGLQYFEKQKPWGVAAEIALPCATQNELDEEAAKTLLANGCYVVAEGANMPSTLGAVEQFIKAGILYAPGKASNAGGVATSGLEMSQNAIRLSWTREEVDQRLFGIMQSIHESCLKYGKVGDTVNYVNGANIAGFVKVADAMLAQGF

SEQ ID NO: 2242 - protein, 259 aa, Neisseria
MKLVRPQKISDQVLSVLEERIAEGVYAEGGKIPPERVLAEEFGVSRPSVRSALNVLVARQVLEARQGDGYYVSVKPQQDFLQSWQELLGKHSNWEQDVFDFSCHIEGCMAALAAERRTDADLKRIGFWLEKFEEACESGNLEHQSEADVSFHQTIADAAHNLLFSHLSGGLLKMLYRQTRSSLIYLNQEEDPRPKLMAQHRVLYEAISNRRPGEASEAAKAHLNYVASSILKDREYQSRNRHADTLAQNDLKRVQDWAV

SEQ ID NO: 2243 - protein, 99 aa, Neisseria
MQRCFNWFDHYCRRLEKYFRRCSIMETWVQNYTAIGGSLYLTAAAALLPIVFFFAALTVLKLKGYQAGLYTLLIALAVAVFGFGMPTGMAVSSLPPQPH

SEQ ID NO: 2244 - protein, 321 aa, Neisseria
MSYTQLTQGERYHIQYLSRHCTVTEIAKQLNRHKSTISREIRRHRTQGQQYSAEKAQRQSRTIKQRKRQPYKLDSQLIQHIDTLIRRKLSPEQVCAYLCKHHRITLHHSTIYRYLRQDKSNGSTLWQHLRICSKPYRKRYGSTWTRGKVPNRVGIENRPAIVDQKSRIGDWEADTIVGKGQKSALLTLVERVTRYTIICKLDSLKAEDTARAAVRALKAHKDRVHTITMDNGKEFYQHTKITKALKAETYFCRPYHSWEKGLNENTNGLIRQYFPKQTDFRNISDREIRRVQDELNHRPRKTLGYETPSVLFLNLFQPLIH

SEQ ID NO: 2245 - protein, 467 aa, Neisseria
MDTTLKTTLTSVAAAFALSACTMIPQYEQPKVEVAETFKNDTADSGIRAVDLGWHDYFADPRLQKLIDIALERNTSLRTAVLNSEIYRKQYMIERNNLLPTLAANANDSRQGSLSGGNVSSSYKVGLGAASYELDLFGRVRSSSEAALQGYFASTANRDAAHLSLIATVAKAYFNERYAEEAMSLAQRVLKTREETYKLSELRYKAGVISAVALRQQEALIESAKADYAHAARSREQARNALATLINQPIPEDLPAGLPLDKQFFVEKLPAGLSSEVLLDRPDIRAAEHALKQANANIGAARAAFFPSIRLTGTVGTGSAELGGLFKSGTGVWSFAPSITLPIFTWGTNKANLDVAKLRQQVQIVAYESAVQSAFQDVANALAAREQLDKAYDALSKQSRASKEALRLVGLRYKHGVSGALDLLDAERSSYAAEGAALSAQLTRAENLADLYKALGGGLKRDTQTDK

SEQ ID NO: 2246 - protein, 1067 aa, Neisseria
MAKFFIDRPIFAWVISIFIIAAGIFGIKSLPVSQYPSVAAPTITLRATYPGASAQVMEDSVLSVIERNMNGVEGLDYMSTSADSSGSGSVSLTFTPDTDENLAQVEVQNKLSEVLSTLPATVQQYGVTVSKARSNFLMIVMLSSDVQSTEEMNDYAQRNIVPELQRIEGVGQVRLFGAQRAMRIWVDPKKLQNYNLSFADVGSALSAQNVQISAGSIGSLPAVRGQTVTATVTAQGQLGTAEEFGNVILRANTDGSNVYLKDVARVGLGMEDYSSSTRLNGVNTTGMAVMLSNSGNAMATAKAVKERMATLEKYFPQGMSWKTPYDTSKFVEISIEKVIHTLIEAMVLVFVVMYLFLQNIRYTLIPTIVVPISLLGGFAFISYMGMSINVLTMFAMVLVIGIVVDDAIVVVENVERIMAGEGLPPKEATKKAMGQISGAVIGITAVLISVFVPLAMFSGATGNIYKQFALTMASSIAFSAFLALTLTPALCATMLKTIPKGHHEEKKGFFGWFNKKFNSWTHGYEGRVAKVLRKTFRMMVVYIGLAVVGVFLFMRLPTSFLPTEDQGFVMVSVQLPAGATQERTNATLAQVTQLAKSIPEIENIITVSGFSFSGSGQNMAMGFAILKDWNERTAPGSDAVAIAGKLTGMMMGTLKDGFGIAVVPPPILELGNGSGLSINLQDRNNTGHTALLAKRNELIQKMRASGLFDPSTVRAGGLEDSPQLKIDINRAAAAAQGISFADIRTALASALSSSYVSDFPNQGRLQRVMVQADEDARMQPADILNLTVPNKSGVAVPLSTIATVSWENGTEQSVRFNGYPSMKLSASPATGVSTGQAMAAVQKMVDELGGGYSLEWGGQSREEAKGGSQTLILYGLAVAAVFLVLAALYESWSIPLAVILVIPLGLIGAAAGVTGRNLFEGLLGSVPSFANDIYFQVGFVTVMGLSAKNAILIIEFAKDLQAQGKSAVEAALEAARLRFRPIIMTSFAFILGVVPLYIAGGASSASQRAIGTTVFWGMLIGTLLSVFLVPLFYVVVRKFFKETAHEHEMAVKHAAEAGITGSDDSQH

SEQ ID NO: 2247 - protein, 412 aa, Neisseria
MAFYAFKAMRAAALAAAVALVLSSCGKGGDAAQGGQPAGREAPAPVVGVVTVHPQTVALTVELPGRLESLRTADVRAQVGGIIQKRLFQEGSYVRAGQPLYQIDSSTYEAGLESARAQLATAQATLAKADADLARYKPLVAAEAVSRQEYDAAVTAKRSAEAGVKAAQAAIKSAGISLNRSRITAPISGFIGQSKVSEGTLLNAGDATVLATIRQTNPMYVNVTQSASEVMKLRRQIAEGKLLAADGVIAVGIKFDDGTVYPEKGRLLFADPAVNESTGQITLRAAVPNDQNILMPGLYVRVLMDQVAVDNAFVVPQQAVTRGAKDTVMIVNAQGGMEPREVTVAQQQGTNWIVTSGLKDGDKVVVEGISIAGITGAKKVTPKEWASSENQAAAPQSGVQTASEAKPASEAK

SEQ ID NO: 2248 - protein, 296 aa, Neisseria
MRKTKTEALKTKEHLMLAALETFYRKGIARTSLNEIAQAAGVTRGALYWHFKNKEDLFDALFQRICDDIENCIAQDAEDAEGGSWAVFRHTLLHFFERLQSNDIYYKFHNILFLKCEHTEQNAAVIAIARKHQAIWREKITAVLTEAVENQDLADDLDKETAVIFIKSTLDGLIWRWFSSCERFDLGKTAPRIIGIMMDNLENHPDLRRKVMVLLLIVNKYWKVNDMKNEIQKNMDKYNPWHEDDFESYEDIARDVSLTTDKTFIEHYLLEVYSEENGHFDQENVHAMIEEIKNAI

SEQ ID NO: 2249 - protein, 522 aa, Neisseria; identical to SEQ ID NO: 68

SEQ ID NO: 2250 - protein, 1069 aa, Neisseria
MFYLYQSNRLETLAALFARIQKVKPLKSALQPEQIIVQSQGMRRYLNTCLARDLGVAANLSFSLPAGLTWKLMKKLIPGIPELSPFAPEVMRWRLLDLFRSEAFRNTAEFEDVRNVLQDYLGSGESADYQLAGQLADIFDQYLVYRPQWIDAWQQGRRLGLGDDEIWQSKLWRYLDDGRQSAPHRVALWEKLLESLSSDKLPERYFVFGISTMAPMYLQLLHKLSEHCDVFVFALNPSGMYWGNVIEAAQILKGGGDPDLTQAGHPLLASLGKQGRDFFDFLNEMEIEGETPVFEEGGRDTLLHALQTDIQNLKMPSEMAGSVNTGDGSIRIVSAHSPLRELQILKDKLLKILHEHPDWQPHDIAVLTPNIESYTPFIEAVFGQAQPGAQALPYSVSDVKISRRQPLFHALSCLFDLLESRFEVDKVLVLLETAPVLRRFGLTEDDLPLLHDMVADLNVHWGLDGEMRGGTDQLFTWKQAVERMILGWMLPKGGNPMWQDVSAWYADVNQTAMFGRFAAFLETLTDIVRIWRQPATVGEWVARCRDLLETLFQAEADDQKSVQNLENEWVKWQAETELAQFSGQLPPHTVIRHIRRFLDSESEAGFLRGGITFCSMVPMRSLPFKVICLLGLNDGDFPRNTKAAVFDLIAKHPAKGDRARRDDDRYLFLEALISAREILYLSYIGRDIRKDEELAPSSLLGELIDTVAAMAGIGSRQLAQNLIEQHPLQAFSRRYFQEGGRSDGIFGTRTDYAAALGQTPEPPQPFFDQPVENAEPVAEIGQDEFIRFWRNPVKVWLQQQLAWSEPHIGEAWEPAEPFEPQHADQIAEIYIEARCEGRDFAQTAARIGAESLLPSGELGRLWQQDFQTAAKQIDTAVLNSPKLPPLSYAIPSDGQILKGSLGNLYRCGQVFYAYGKPNAPQRIAFLLEHLIFCAVMPSEAEMRQTFIVQSGETEILAEIAQDRALQLLSEWMAFFNIGQNRPLPFFAKTSLATAEAFAQKQDWEAALKKAQTAYHGSKVSKGQKDYTEVALVFGNASQNPLEQPLFENLVRLLADTLAAAEKKEEAGEA

SEQ ID NO: 2251 - protein, 469 aa, Neisseria
MDTQIKTEADNQSNRRYLTVWRWHFYAGLLVMPFLTLLAVTGLGMLLFANITGKEGERIHVVPQATVQPLSVQAEAARSAVNPETSSVVQYIAPRADDMVAVFRVNNEGKATMVAVDPYTAKVVSTMPRNQGWYYTMDEIHSDMMLGAAGDYLLETAASLTIIMVVSGLYLWWVKRRGIKAMLLPSKGRARSWWRNLHGTFGTWVSLILLLFCLSGIAWAGIWGGKFVQAWSQFPAGKWGVEPNPVSVVPTHGEVLNDGKVKEVPWVLELTPMPVSGTTVGKDGINPDEPMTLETVDRFAREIGFKGRYQLNLPKGEDGVWTLSQDSMSYDMISPFADRTVHIDQYSGKILADIRFDDYNPFGKFMAASIALHMGTLGWWSVLANVLFCLAVIFIGISGCVMWWKRRPTGAVGIVPPAQKVKLPVWWMMALPLLAIALLFPTSLLAIAVIWLLDTLLLSRIPVLRRWFK

SEQ ID NO: 2252 - protein, 365 aa, Neisseria
MNTTSQFTSNFWNIYIAVIVLLSFIALAWLLLSQNVVKRPKKGEEVQTTGHEWDGIAEYDNPLPRWWFWLCVLTWLFGIGYLVMYPGVGDYKGLLKWTSHNQYEKEVKKADEQYGKLYAKFADMPIEKVAKDPQAKQIAQNLFNTYCIQCHGSDAKGSKGFPNLTDSDWLWGGDPDKIHETIEKGRVATMPAWGPALGEEGVKDVAHYVMSLSKPEGQYDEERAARGQALFSGPPANCFTCHGDKGQGIQGLGPNLTDDVWLWGGTQKSIIETITNGRSSQMPAWGHFLDKDKLHIMTAYVWGLSDKDGKAPVKKAEPAPTPAPAAEPAASAPAEAAQAVSEAKPAAAEPKAEEKAAPAAKADGK

SEQ ID NO: 2253 - protein, 203 aa, Neisseria
MKLQQLAEEKIGVLIVFTLLVVSVGLLIEVVPLAFTKAATQPAPGVKPYNALQVAGRDIYIREGCYNCHSQMIRPFRAETERYGHYSVAGESVYDHPFQWGSKRTGPDLARVGGRYSDEWHRIHLLNPRDVVPESNMPAFPWLARNKVDVDATVANMKALRKVGTPYSDEEIAKAPEALANKSELDAVVAYLQGLGLALKNVR

SEQ ID NO: 2254 - protein, 481 aa, Neisseria
METLMDTQTYNYKVVRQFAIMTVVWGIVGMLVGVIVAAQLFAPALDLSNIGPWFHFGRLRPLHTNAVIFAFGGCGLIGTSYYVVQRTCNTRLFGGWLPAFTFWGWQAVIVAAVVSFPMGWTQGKEYAELEWPIDILITLVWVAYAIVFFGTIAKRKIKHIYVANWFYGGFILAVALLHIVNNISIPAGLMKSYPVYSGAIDAMVQWWYGHNAVGFFLTAGFLGMMYYFVPKQAARPVYSYRLSVVHFWALIFTYMWAGPHHLHYTALPDWTQSLGMVLSLILFAPSWGGMINGIMTLSGAWDKLRTDPILKFLIVSLSFYGMSTFEGPMMSIKTVNALSHYTDWTVAHVHAGALGWVGFVTIGSVYYMIPRLFGKEQMHSTKLVEAHFWIATIGVVLYIAAMWIAGVMQGLMWSSLNDDGTLTYSFVESVKRTMPYYVIRFAGGLLYLSGMCIMAYNVYRTAIGGKAVDAEIPAVSQTQHH

SEQ ID NO: 2255 - protein, 582 aa, Neisseria
MIHYKITPSPLDHEWHILLTFTQDDDLPIEISLPNWVPGSYLIRDFSRHITSIHASCNGTSMPLEQIAKNRWHAAAVRGEWQIRYTVYAFDLSVRGSFLTTERGFFDGSCLFLKVEGTETLPHRLELTGIPSEWRIATTLPETGRFVFQAASYAELIDRPVEMGLIEFLDFEAAGIPHTIALSGIYPDFDRNRLVSDIKKICETELAVFSSPAPFQKYLFLLHVGDHIYGGLEHTDSTALLADRHSLPPYGMTDADDTYTTLLGLFSHEYFHAWNVKSIKPAAFVPYDLDKENYTEQLWAFEGITSYYDDLFLARSRTISPESYLNLLAQGITRVQQTRGRLRQTLAESSFTAWNKFYKPDENSPNAIVSYYQKGALAALCLDLIIRNRSNGRHSLDTLMDKLYREWRDTHSGIPEKHWQIRCQEITGLDLEDFFQKALYSTEDLPLAECLATAGVGLTFLPLPRQHGGGYAEHICPVPSAGDFGARFKQNTDHIVLTHVFNGGSAESAALCPQDKIIALDGYACTDFTAQWARYHVNAKINIHFFRAGILRQTVLTVQAAAADTAILHITDRNLLDNWLFG

SEQ ID NO: 2256 - protein, 142 aa, Neisseria
MAILKLDEHLYISPQLTKADAEQIAQLGIKTVICNRPDREEESQPDFAQIKQWLEQAGVTGFHHQPVTARDIQKHDVETFRQLIGQAEYPVLAYCRTGTRCSLLWGFRRAAEGMPVDEIIRRAQAAGVNLENFRERLDNARV

SEQ ID NO: 2257 - protein, 144 aa, Neisseria
MAFGSMNSGDDSPMSDINVTPLVDVMLVLLIVFMITMPVLTHSIPLELPTASEQTNKQDKQPKDPLRLTIDANGGYYVGGDSASKVEIGEVESRLKAAKEQNENVIVAIAADKAVEYDYVNKALEAARQAGITKIGFVTETKAQ

SEQ ID NO: 2258 - protein, 220 aa, Neisseria
MNLKLVFESGDPVLIGVFVLMLLMSIVTWCLVVLRCIKLYRARKGNAAVKRHMRDTLSLNDAVEKVRAVDAPLSKLAQEALQSYRNYRRNEASELAQALPLNEYLVIQIRNSMAQIMRRFDYGMTALASIGATAPFIGLFGTVWGIYHALINIGQSGQMSIAAVAGPIGEALVATAAGLFVAIPAVLAYNFLNRGTKILTQDLDAMAHDLHVRLLNQKDS

SEQ ID NO: 2259 - protein, 280 aa, Neisseria
MDKERILTPAVVFSVALLHLAMVALLWQAHKLPVIESGNVIEFVDLGDFGGGDGAPEGAGAPAAPEPQPVPEPPKPVEPPKPVLKPVVTKKADADIQQPKEEPKPEEKPKPEEKPKPEPKPEAKPVPKPAEKPVEKPSEKPAEHPGNASAKADSEQGNGEDKGTGTKGDGTGRGEGSGKGSGGVKGEHGEGAGSSKGNPLRANGSIPRPAYPTLSMENDEQGTVVLSVLVSPGGHVESVKIVKSSGFSRLDNAARKAAQNGHFQANAWTEFKVPVKFELN

SEQ ID NO: 2260 - protein, 212 aa, Neisseria; identical to SEQ ID NO: 470

SEQ ID NO: 2261 - protein, 266 aa, Neisseria
MKKTIFNITKMDCPSEEQLIRMRLKDVSDIYELQFDIAGRCLTVYHDNQDTTILQVLEPLNFDSHIISTEVIVDKIVFNKPDEHLEKRLLYQVLMINFVFFIIECSVGIFANSMGLIADSLDMLADSFVYILALSAIGMTLAYKKRVAFLAGITQIILALFGVIEVIRRFIGAEQLPNYQLMIGTAFLALIANWLCLYLLSKNQNKEIHIKASMIFTSNDIIINIGVIAAGALTLLTHSSYPDLIIGMIVFVIVLFGARNILKLAK

SEQ ID NO: 2262 - protein, 167 aa, Neisseria
MDAFDFFMQGNFKKIATEQGLDRKYFIFQYIVCNLSAISSFCLMKIIHTYTILYILIAVIGIINGFLLRSKVLSIVKNKQKFLSDMFPLEMPFFFVEYKIPILARFLNRGMKWLYLPSFFCLVAICFSIYILNEEGGWMPYFACYWFGLCYPVSTYYVFLSRDYKHI

SEQ ID NO: 2263 - protein, 213 aa, Neisseria
MKLYIYDHCPFCVRARMAAGLFGADVEEAVLANDDEATPIGMIGAKQVPVLQKEDGSFMGESLDIVRHFDREDRLKDEVRPEIRAWLDKVGGYNDKLVQPRVIKIGLPEFATPEAVKYFTDKKEKSIGSFSANLNKTAQYLERINADLQELENLMDGASDGINGGIGMEDILVFPVLRNLTVVRGIEWPQKVMGYLMTMSEKSGVPLYFDRAL

SEQ ID NO: 2264 - protein, 737 aa, Neisseria
MTAISPIQDTQSATLQELREWFDSYCAALPDNDKNLIGTAWLLAQEHYPADAATPYGEPLPDHFLGAAQMVHELDLLPDAVAATLLADIGRYVPDWNLLVSERCNSTVAELVKGVDEVQKLTHFARVDSLATPEERAQQAETMRKMLLAMVTDIRVVLIKLAMRTRTLQFLSNAPDSPEKRAVAKETLDIFAPLANRLGVWQLKWQLEDLGFRHQKPEKYREIALLLDEKRTERLEYIENFLNILRGELKKYNVHFEVAGRPKHIYSIYKKMVKKKLSFDGLFDIRAVRILVDTVPECYTTLGIVHSLWQPIPGEFDDYIANPKGNGYKSLHTVIVGPEDKGVEVQIRTFDMHQFNEFGVAAHWRYKEGGKGDSAYEQKIAWLRQLLDWRENMAESGKEDLAAAFKTELFNDTIYVLTPHGKVLSLPTGATPIDFAYALHSSIGDRCRGAKVEGQIVPLSTPLENGQRVEIITAKEGHPSVNWLYEGWVKSNKAIGKIRAYIRQQNADTVREEGRVQLDKQLAKLTPKPNLQELAENLGYKKPEDLYTAVGQGEISNRAIQKACGTLNEPPPVPVSETTIVKQSKIKKGGKNGVLIDGEDGLMTTLAKCCKPAPPDDIIGFVTRERGISVHRKTCPSFQHLAEHAPEKVLDASWAALQEGQVFAVDIEIRAQDRSGLLRDVSDALARHKLNVTAVQTQSRDLEASMRFTLEVKQVNDLPRVLASLGDVKGVLSVTRL

SEQ ID NO: 2265 - protein, 467 aa, Neisseria
MTLLNLMIMQDYGISVCLTLTPYLQHELFSAMKSYFSKYILPVSLFTLPLSLSPSVSAFTLPEAWRAAQQHSADFQASHYQRDAVRARQQQAKAAFLPHVSANASYQRQPPSISSTRETQGWSVQVGQTLFDAAKFAQYRQSRFDTQAAEQRFDAAREELLLKVAESYFNVLLSRDTVAAHAAEKEAYAQQVRQAQALFNKGAATALDIHEAKAGYDNALAQEIAVLAEKQTYENQLNDYTDLDSKQIEAIDTANLLARYLPKLERYSLDEWQRIALSNNHEYRMQQLALQSSGQALRAAQNSRYPTVSAHVGYQNNLYTSSAQNNDYHYRGKGMSVGVQLNLPLYTGGELSGKIHEAEAQYGAAEAQLTATERHIKLAVRQAYTESGAARYQIMAQERVLESSRLKLKSTETGQQYGIRNRLEVIRARQEVAQAEQKLAQARYKFMLAYLRLVKESGLGLETVFAE

SEQ ID NO: 2266 - protein, 475 aa, Neisseria
MFFSALKSFLSRYITVWRNVWAVRDQLKPPKRTAEEQAFLPAHLELTDTPVSAAPKWAARFIMAFALLALLWSWFGKIDIVAAASGKTVSGGRSKTIQPLETAVVKAVHVRDGQHVKQGETLAELEAVGTDSDVVQSEQALQAAQLSKLRYEAVLAALESRTVPHIDMAQARSLGLSDADVQSAQVLAQHQYQAWAAQDAQLQSALRGHQAELQSAKAQEQKLVSVGAIEQQKTADYRRLRADNFISEHAFLEQQSKSVSNWNDLESTRGQMRQIQAAIAQAEQNRVLNTQNLKRDTLDALRQANEQIDQYRGQTDKAKQRQQLMTIQSPADGTVQELATYTVGGVVQAAQKMMVIAPDDDKMDVEVLVLNKDIGFVEQGQDAVVKIESFPYTRYGYLTGKVKSVSHDAVSHEQLGLVYTAVVSLDKHTLNIDGKAVNLTAGMNVTAEIKTGKRRVLDYLLSPLQTKLDESFRER

SEQ ID NO: 2267 - protein, 117 aa, Neisseria
MFTTNDLRHFLEGLAILFSIGYWGTMLLLLWFLVRFAYKKPKRNPGKILSGSLTAAAILMLFVWIIPKQFGPIKEEIQAQEEWDRKYKEAEAVFNEQCKTAGERFTRRRTMWKGLCC

SEQ ID NO: 2268 - protein, 136 aa, Neisseria
MGNTAMWMSCNPTIPILFGIQVKIFPLNQIFNHIHPARYAVTFENNVDSKLRRHWVAGATIRIIDRQTDEVIAKKTIYVFEKGLDGTGGARMPWKFAILCNKERLTSSEPLSDFVLSVLKPYILRPLYIASLRRDD

SEQ ID NO: 2269 - protein, 96 aa, Neisseria; identical to SEQ ID NO: 1065

SEQ ID NO: 2270 - protein, 65 aa, Neisseria; identical to SEQ ID NO: 1064

SEQ ID NO: 2271 - protein, 94 aa, Neisseria; identical to SEQ ID NO: 1063

SEQ ID NO: 2272 - protein, 92 aa, Neisseria; identical to SEQ ID NO: 1062

SEQ ID NO: 2273 - protein, 96 aa, Neisseria
MNKNERDFFYISNSDLDKLSESYPDRPLSYVFYCYLKETGLLKNFSMDKCHNFFNRINFNESCFEIKFKDDSFFIIGNGKIDVSDSNNFFSVSFEC

SEQ ID NO: 2274 - protein, 501 aa, Neisseria
MYALSEKYNDNGFKAYKVLGEGGGIHTEYNYKFDKSLNLNVLESSTGARSLEKVPVKVTASVSRAAVLSGVGKLARLGAKLSTRAVPYVGTALLAHDVYETFKEDIQAQGYQYDPETDKFVKGYEYSNCLWYEDKRRINRTYGCYGVDSSIMRLMSDDSRFPEVKELMESQMYRLARPFWNWHKEELNKLSSLDWNNFVLNRCTFNWNGGDCLVNKGDDFRNGADFSLIRNSKYKEEMDAKKLEEILSLKVDANPDKYIKATGYPGYSEKVEVAPGTKVNMGPVTDRNGNPVQVVATFGRDSQGNTTVDVQVIPRPDLTPGSAEAPNAQPLPEVSPAENPANNPNPNENPGTSPNPEPDPDLNPDANPDTDGQPGTRPDSPAVPDRPNGRHRKERKEGEDGGLLCDYFPEILACQEMGKPSDGMFHDISIPQVIDDKTWSSHNFLPSNGVCPQPKTFHVFGRQYQASYEPLCVFAEKIRFAVLLAFIIMSAFVVFGSLKGK

SEQ ID NO: 2275 - protein, 96 aa, Neisseria
MPLLAGLIPLLGILLKMLIVRIILATGLTFVTYAGYLIALEKFKDYTSNAINSMPSDILNLLLISGFGQGLGYLFGAFSFFIGMHAFKKLTFVFPG

SEQ ID NO: 2276 - protein, 361 aa, Neisseria
MIYLFTGNMGTGKTSRVVSMILNNEDGLFKMKLEDGTEVDRPLYFCHIDGLDKRQFKAHELTEEQIMSAPLRDVIPEGAVLIVDEAHYTYPVRAAGRPVPPYIQELTELRHHGHTVILMTQHPSQLDIFVRNLVSKHVHLERKAIGMKQYYWYKCVTSLDNPAGVSGVEVASWKPPKEAFKYYKSASQHQKFKKKVPWAVWALIAIVGFVGWKSYGIFKVYSKATDSRIEQEAQKESVVQTMTEQPASSEEMPLKNSDNLKPEDFVPTLPEKPESKPIYNTVRQVKTFEQIAGCIDGGKSDCTCYSNQGTPLKEITKIMCKEYVKNGLPFNPYKDEQQRTEQVEQSAKADKPQVLVMGGKP

SEQ ID NO: 2277 - protein, 316 aa, Neisseria
MYLGIDVSKLTIDCCLIVDGQNYQKKFQNNKGGFEQLINWLQSHKVNDKLHCVCEATGTYYEALAEYLYSRYTITVENPRKIKGYAIAELQRSKTDTQDAKLIAQYCQDRKHKLKAWKPPTKEQKQLQEIARYLDYLKQQRATEKAKQHEAPDYIKSHIQTTISNLTAQIQIVKKQLLQFYKDNPSYNNLRKRLKTITGIGEQATAVLLSTYKRHEFKNARQFTAYLGLDPRKFQSGTSVNGKSRISKIGSSEIRKSLYMPALVAYRCNAFPEFVGRLKNKGKHIKLILIAIMRKLAVIAFTILQNGQDFQVERYK

SEQ ID NO: 2278 - protein, 126 aa, Neisseria
MPSVELLLVIVGLPRGTFYYQLVVQSAEDKYADLKRHIHDIYQKQLKDNGLVQSMSRKGNCLDNAAMESFFGTLKSECFHTCKYDSVTELEAVLHEYIRYYNNDRIKLKLKGLSPVQYRIQSLKAA

SEQ ID NO: 2279 - protein, 145 aa, Neisseria
MSRYLITFDMDTNCLKDNYHGNNYTNAYSDIKTILARHGFENIQGSVYLGREGISEAHGTIAIQELTARFDWFYSCISNIKFYRLESDLNAQFIADGVYQAKQAFLQRVEQLRISLTEAGLSDEQINQVLEKQKFELESPNLKLN

SEQ ID NO: 2280 - protein, 34 aa, Neisseria
VMFHTLPEALKRTEIAAARQKLTELRRMLVSKGG

SEQ ID NO: 2281 - protein, 114 aa, Neisseria
MANRCRLKPYNRRQNNACSNRTHTLPANGLRNLRLLDLRTKVTELKHIGGQSTAAIADLAGEMRRLAKKSKMLLKGLWPFLSSTISAFKINQSLFKHYYKTVQLLNCKHRKKNY

SEQ ID NO: 2282 - protein, 64 aa, Neisseria
MVLFKSIKQESISFLSEDLKKDWMFHKVKTGEKDGYGSDEMLSVPRVYLEMMSRKTGVPYSSIL

SEQ ID NO: 2283 - protein, 76 aa, Neisseria
MQGCDHYIFLFRSVYDFTVNCYSMCLAFQLPIFEYWRRHFHQCRNADQNSHKPYWFLWQQHLSVCSSDHKSNMIGW

SEQ ID NO: 2284 - protein, 70 aa, Neisseria
MRSRSVRLSQMLSSPFVPICFYIRLCFSNLLISIICKGKDNYFPVRNKPILLNTLKPNTPINTILKHSLF

SEQ ID NO: 2285 - protein, 454 aa, Neisseria
MQHLTERMTQIAKLLNSSANNPDIDIPDFLTEIKDYSEFSVTDENGTYLHWDKFRRIHTEDTRMKWRAVKESRKKIQKPIDFPFEHQFWFCIPDSLQARLHLIDKSCGSSIGTSSLGGFGRSEQNRFLLKSLIMEEAITSAQLEGAATTRKVAKDMLKSQRKPKTKDEIMIVNNYHLMKKAVELKNTPLSVEMILDLHRIATSNAIENKAEPGQFRQDDEIFIADINGNSLYQPPPHGQVHTLMEEVCAFANNTYDGVENPFIHPVVQAIILHFLIGYIHPFGDGNGRTARALFYWFMLKNGYWLFEYISISRLLKNAPAQYAKSYLYAETDDLDLTYFIYYQCDIIKRAVADLEHYISDKQKHQQEFKAAIAQYTEKIGKLNQRQIGILQKAVEESGKIFTAQEIANQYGISLNTARSDLSKLGEYRFLVPFKSGNALEYVAPQDLLERLEKK

SEQ ID NO: 2286 - protein, 168 aa, Neisseria
METTFALLNFKESLCYIYPPTEPVRYVSSIVALNVHSPNGTGDWHSAKALSDRAYPEKFYIYGENQERNTNHLFGDNGIIDGTDRLNKMGYFPENIPVWLADHPRACVDYLYTAVLQTGSIGRVILDDWFPSDEDKQSVYDLLNQIEPHLNTQEWENLQLWKRKNPIM

SEQ ID NO: 2287 - protein, 417 aa, Neisseria
MRKPRITYLDVWANDERIGTLEKGAMYRFAYDNPNSSLLGLHYQDRSKVYISNNMPHIFAQYFPEGFLDAHITSKYAFHDAPFEDNEMLRLAILCRETLGRIHVRCNDPLFNEWIDGLEMKNPRILTERDLLGINARQVFQQYMAEIFHHGRFVSVSGIQQKMSLDAIRRNTKQTASYIAKGFDASEYPCLAANEFLCMQTIKQAGIAVAQTSLSEDSSVLLVRRFDVSEQGYFLGMEDFTSLRQYSVEDKYKGSYAAIAQIIRQISGRPDEDLIHFFNQLAASCILKNGDAHLKNFSVLYHDEYDVRLAPVYDVLDTSIYRVGTQGIFDAYDDTLALNLTNHGKKTYPSKNTLLDFAEKYCDLGREDASFMIDTIVQAKEQVLVKYSDVLRENEWLAQKWHFIPDENEEGLPFTFR

SEQ ID NO: 2288 - protein, 748 aa, Neisseria
MKLPLSYLPNIRFLSWCCLLAGIIAPATLLASPNPAEIRMQQDIQQRQREEQLRQTMQPESDVRLHQKNTGETVNQLMGDDSSQPCFAINEVVLEGEHHARFQFALKRALRETGFQAGKCLHAGNINQIMSLAQNALIGRGYTTTRILAAPQDLNSGKLQLTLIPSYLRSIRIDRSNDDQTHAGRIAAFQNKFPTRSNDLLNLRDLEQGLENLKRLPTAEADLQIVPVEGEPNQSDVVVQWRQRLLPYRVSVGMDNSGSEATGKYQGNITFSADNPLGLSDMFYVNYGRSIGGTPDEESFDGHRKEGGSNNYAVHYSAPFGKWTWAFNHNGYRYHQAVSGLSEVYDYNGKSYNTDFGFNRLLYRDAKRKTYLGVKLWMRETKSYIDDAELTVQRRKTAGWLAELSHKEYIGRSTADFKLKYKRGTGMKDALRAPEEAFGEGTSRMKIWTASADVNTPFQIGKQLFAYDTSVHAQWNKTPLTSQDKLAIGGHHTVRGFDGEMSLSAERGWYWRNDLSWQFKPGHQLYLGADVGHVSGQSAKWLSGQTLVGTAIGIRGQIKLGGNLHYDIFTGRALKKPEFFQSRKWASGFQVGYTFVMPITPPLNIISPKLYPNEQWNESEALGAITWLWYQSPTHRQVPIVEMMTYILPVLKNGQFALFCKGTQPIGYISWAYFDEVAQAHYLESDRHLRDNSDWNCGDNIWLIQWFAPLGHSHQMRSAVRQLFPSTTVRALYHKGSDKGLRILTFKT

SEQ ID NO: 2289 - protein, 104 aa, Neisseria
MKKTLSNLVLISFCSTMLTACPFWGSCADWNCSKLNPRWEKAVDTCETENLTFVLHELGNQLGYKSITEVSFSEIGQHISYQCIHHGGGYNIRKDKQYGHLFVQ

SEQ ID NO: 2290 - protein, 99 aa, Neisseria
MKKKLSKYSLFLSSVFCLTACATTLLGTVVVGTALYGTSSNWTTTDKEHQEIMNCLDKALVKLNIYFENDEEKYKNKTVMDIYYQCIKNPNYVVTHNNL

SEQ ID NO: 2291 - protein, 337 aa, Neisseria
MAWSMFATTQADRAVRSATAPKEMWFHKKIIDEKTGKVSFDTRQIWSLNDLSKEELASIQDTNGKVITVSNPGIFNNREDSLSNAAKQNRNSTNGSGVIAVMNPPTGKYKSDSNNKIKDFLWLGSSLVSELMYVGYDQLNNKVFQGYLPKTNSEKLNQDIYREVQKMGNGWSVDTSNHSRGGITASVSLKDWVNNQKQNGIAPIRKARFYGTATNVQNDYADVLQKNGYTYTGADGKTYNSGSYSIVHDKDFVGNKWIPFLLGTNDTTQGTCKGLCYSHSSYFAEVPKAGTKEFDDYVKIWGEVEYDAQGKPINKSKPILVEPNKTKDNEKYEKEAF

SEQ ID NO: 2292 - protein, 138 aa, Neisseria
MNKNILYIFSLLITIVIFFIFEKNVIRKISFNYNKKEFLISDITNFNWDYVKLYIINSDFQKIVFYHKSKIVFEELIELDKEGNVLPQYLFDSDLKNVEYYECDYKNGKMQLLKKEKSHFFDGYFYYYKPINCRPKLL

SEQ ID NO: 2293 - protein, 2514 aa, Neisseria
MNKTLYRVIFNRKRGAVVAVAETTKREGKSCADSDSGSAHVKSVPFGTTHAPVCRSNIFSFSLLGFSLCLAVGTANIAFADGIIADKAAPKTQQATILQTGNGIPQVNIQTPTSAGVSVNQYAQFDVGNRGAILNNSRSNTQTQLGGWIQGNPWLARGEARVVVNQINSSHSSQMNGYIEVGGRRAEVVIANPAGIAVNGGGFINASRATLTTGQPQYQAGDLSGFKIRQGNVVIAGHGLDARDTDFTRILSYHSKIDAPVWGQDVRVVAGQNDVVATGNAHSPILNNAAANTSNNTANNGTHIPLFAIDTGKLGGMYANKITLISTAEQAGIRNQGQLFASSGNVAIDANGRLVNSGTMAAANAKDTDNTAEHKVNIRSQGVENSGTAVSQQGTQIHSQSIQNTGTLLSSGEILIHNSGSLKNETSGTIEAARLAIDTDTLNNQGKLSQTGSQKLHIDAQGKMDNRGRMGLQDTAPTASNGSSNQTGNSYNASFHSSTTTPTTATGTGTATVSISNITAPTFADGTIRTHGALDNSGSIIANGQTDVSAQQGLNNAGQIDIHQLNAKGSAFDNHNGTIISDAVHIQAGSLNNQNGNITTRQQLEIETDQLDNAHGKLLSAEIADLAVSGSLNNQNGEIATNQQLIIHDGQQSTAVIDNTNGTIQSGRDVAIQAKSLSNNGTLAADNKLDIALQDDFYVERNIVAGNELSLSTRGSLKNSHTLQAGKRIRIKANNLDNAAQGNIQSGGTTDIGTQHNLTNRGLIDGQQTKIQAGQMNNIGTGRIYGDNIAIAATRLDNQDENGTGAAIAARENLNLGIGQLNNRENSLIYSGNDMAVGGALDTNGQATGKAQRIHNAGATIEAAGKMRLGVEKLHNTNEHLKTQLVETGREHIVDYEAFGRHELLREGTQHELGWSVYNDESDHLRTPDGAAHENWHKYDYEKVTQKTQVTQTAPAKIISGNDLTIDGKEVFNTDSQIIAGGNLIVQTEKDGLHNEQTFGEKKVFSENGKLHSYWREKHKGRDSTGHSEQNYTLPEEITRNISLGSFAYESHRKALSHHAPSQGTELPQSNGISLPYTSNSFTPLPSSSLYIINPVNKGYLVETDPRFANYRQWLGSDYMLDSLKLDPNNLHKRLGDGYYEQRLINEQIAELTGHRRLDGYQNDEEQFKALMDNGATAARSMNLSVGIALSAEQVAQLTSDIVWLVQKEVKLPDGGTQTVLVPQVYVRVKNGDIDGKGALLSGSNTQINVSGSLKNSGTIAGRNALIINTDTLDNIGGRIHAQKSAVTATQDINNIGGMLSAEQTLLLNAGNNINSQSTTASSQNTQGSSTYLDRMAGIYITGKEKGVLAAQAGKDINIIAGQISNQSEQGQTRLQAGRDINLDTVQTSKHQATHFDADNHVIRGSTNEVGSSIQTKGDVTLLSGNNLNAKAAEVSSANGTLAVSAKNDINISAGINTTHVDDASKHTGRSGGGNKLVITDKAQSHHETAQSSTFEGKQVVLQAGNDANILGSNVISDNGTQIQAGNHVRIGTTQTQSQSETYHQTQKSGLMSAGIGFTIGSKTNTQENQSQSNEHTGSTVGSLKGDTTIVAGKHYEQIGSTVSSPEGNNTIYAQSIDIQAAHNKLNSNTTQTYEQKGLTVAFSSPVTDLAQQAIAVAQSSKQVGQSKNDRVNAMAAANAGWQAYQTGKSAQNLANGTTNAKQVSISITYGEQQNRQTTQVQANQAQASQIQAGGKTTLIATGAAEQSNINIAGSDVAGKAGTILIADNDITLQSAEQSNTERGQNKSAGWNAGAAVSFGQGGWSLGVTAGGNVGKGYGNGDSITHRHSHIGDKGSQTLIQSGGDTTIKGAQVRGKGVQVNAKNLSIQSVQDRETYQSKQQNASAQVTVGYGFSAGGDYSQSKIRADHVSVTEQSGIYAGEDGYQIKVGNHTDLKGGIITSTQSAEDKGKNRFQTATLTHSDIKNHSQYKGESFGLGASASISGKTLGQGAQNKPQNKHLTSVADKNSASSSVGYGSDSDSQSSITKSGINTRNIQITDEAAQIRLTGKTAAQTKADIDTNVTTDTAERHSGSLKNTFNKEAVQSELDLQRTVSQDFSKNVQQANTEINQHLDKLKADKEAAETAAAEALANGDMETAKRKAHEAQDAAAKADNWQQGKVILNMLASGLAAPTQSGAGIAAATASPAVSYAIGQHFKDLAGQNANGKLTASQETAHVLAHAVLGAAVAAVGDNNALAGALSAGGSEAAAPYISKWLYGKEKGSDLTAEEKETVTAITNVLGTATGAAVGNSATDAAQGSLNAQSAVENNDTVEQVKFALRHPRIAIAIGSVHKDPGSTLEPNISTIASTFQLNLFPNSEFGGEGGVGNAFRHVLWQATITREFGKDIAVKVGNSHESGEKINYSIRRNLSLDKADEMIDQLNNEIGREIALNTNRLNTKELVGLILETYKNNGFYQAERNSNGNYDVVRKRLSEKDYQNTSNILIHLDNTGAGFKIQQRRKQIRAQISARQWRR

SEQ ID NO: 2294 - protein, 64 aa, Neisseria
RLKIPFERNGKVYTVVVPNAQSATLLPIIREKVKSDGIVYTDTFRSYDVLDVSEFSHLRKFSSI

SEQ ID NO: 2295 - protein, 321 aa, Neisseria; identical to SEQ ID NO: 2244

SEQ ID NO: 2296 - protein, 144 aa, Neisseria
MNKNYLFYLIQNIKSIFLIGGVFFGLLIFSGLWGNDFKLSFLGVIDFIFGMVGGGFIVMLWFLIPVILSTLFRWVFQNQLAVSVILTFIVFYTYGYFSLFNSSERVGSFWYLVIPTIMFIGLSEWFIYKSSVHSLGENVTPRSN

SEQ ID NO: 2297 - protein, 612 aa, Neisseria
MRKVCASARTRSMIYGSMPSEKLTIFQTAFVMQVNIQIPYILPRCVRAEDTPYACYLKQLQVTKDVNWNQVQLAYDKWDYKQEGLTGAGAAIIALAVTVVTAGAGAGAALGLNGAAAAATDAAFASLASQASVSLINNKGNIGNTLKELGRSSTVKNLMVAVATAGVADKIGASALNNVSDKQWINNLTVNLANAGSAALINTAVNGGSLKDNLEANILAALVNTAHGEAASKIKQLDQHYITHKIAHAIAGCAAAAANKGKCQDGAIGAAVGEILGEALLDGRDPGSLNVKDRAKIIAKAKLAAGTVAALSKGDVNAAANAAAVAVESNALSKERMDKLTKCLSGKTCSTTMEKVNAIKKDEQFSKVIDTEIQKVCSRNPLGDGCRNGINMSIKYIAMPAAWKYMPTDVSRVAKEVFGYLYNSQGASTRFDKYFNTIDNRADFFAASNLYEQNLGSKARWFGGADFVSRAAITGLGADGEASYITFAAGKVVGNPPIYEWRAASGNALIVNGFYNFRDLFNKKTNPREWDIQQLKSEQKLLQPIHQKYLSNEKDYLSLIKGVTSNKIFSIIPNPLDERKKIEDGINMLDYKSRIKYGCKLMGYSEKQGCKP

SEQ ID NO: 2298 - protein, 124 aa, Neisseria; identical to SEQ ID NO: 1080

SEQ ID NO: 2299 - protein, 125 aa, Neisseria; identical to SEQ ID NO: 1079

SEQ ID NO: 2300 - protein, 601 aa, Neisseria
MKTALPSRVVAESANLQSGWDAKLQGTQFETTLGGAAIRAGVGDQARADAKIILEGIKSSVRTETVSSSKSALWQKQAGRGSNIETLQLPSFTGSVAPVLSAPGGYIVDIPKGNLKTEIEKLAKQPEYAYLKQLQVAKNVNWNQVQLAYDKWDYKQEGLTRAGAAIIALAVTVVTAGAGVGAALGLNGAAAAAADAAFASLASQASVSLINNKGDVGKTLKELGRSRTVKNLVVAAATAGVSNKLGASSLATWSETPWVNNLNVNLANAGSAALINTAVNGGSLKDNLEANILAALVNTAHGEAASKIKGLDQHYVAHKIAHAVAGCAAAAANKGKCQDGAIGAAVGEIVGEALVKNTDFSDMTPEQLDLEVKKITAYAKLAAGTVAGVTGGDVNTAAQTAQNAVENNAVKAVVTAAKVVYKVARKGLKNGKINVRDLKQTLKDEGYNLADNLTTLFDETLDWNDAKAVIDIVVGTELNRANKGEAAQKVKEVLEKNRPYIPNKGAVPNMSTYMKNNPFGKQLAQISEKTTLPTQQGQSVFLVKRNQGLLKTGDRFYLDGQHKNHLEVFDKNGNFKFVLNMDGSLNQMKTGAAKGRKLNLK

SEQ ID NO: 2301 - protein, 34 aa, Neisseria
MPWKISTTTNLTPVPSANLSALPTTRCTTPPPTP

SEQ ID NO: 2302 - protein, 81 aa, Neisseria
MEELLNDGSIRLHDYTDGIGIPLTGTSKEQVQKLKDIWPTLEDAQAIWPEDPWYYLEWLWWDIACPIDLADLPNIDIYEQA

SEQ ID NO: 2303 - protein, 34 aa, Neisseria
MRNKKLRFLIFKSIYPQFLTLIKIKWVLIFKMKT

SEQ ID NO: 2304 - protein, 1995 aa, Neisseria
MNKGLHRIIFSKKHSTMVAVAETANSQGKGKQAGSSVSVSLKTSGDLCGKLKTTLKTLVCSLVSLSMVLPAHAQITTDKSAPKNQQVVILKTNTGAPLVNIQTPNGRGLSHNRYTQFDVDNKGAVLNNDRNNNPFVVKGSAQLILNEVRGTASKLNGIVTVGGQKADVIIANPNGITVNGGGFKNVGRGILTTGAPQIGKDGALTGFDVRQGTLTVGAAGWNDKGGADYTGVLARAVALQGKLQGKNLAVSTGPQKVDYASGEISAGTAAGTKPTIALDTAALGGMYADSITLIANEKGVGVKNAGTLEAAKQLIVTSSGRIENSGRIATTADGTEASPTYLSIETTEKGAAGTFISNGGRIESKGLLVIETGEDISLRNGAVVQNNGSRPATTVLNAGHNLVIESKTNVNNAKGPATLSADGRTVIKEASIQTGTTVYSSSKGNAELGNNTRITGADVTVLSNGTISSSAVIDAKDTAHIEAGKPLSLEASTVTSDIRLNGGSIKGGKQLALLADDNITAKTTNLNTPGNLYVHTGKDLNLNVDKDLSAASIHLKSDNAAHITGTSKTLTASKDMGVEAGSLNVTNTNLRTNSGNLHIQAAKGNIQLRNTKLNAAKALETTALQGNIVSDGLHAVSADGHVSLLANGNADFTGHNTLTAKADVNAGSVGKGRLKADNTNITSSSGDITLVAGNGIQLGDGKQRNSINGKHISIKNNGGNADLKNLNVHAKSGALNIHSDRALSIENTKLESTHNTHLNAQHERVTLNQVDAYAHRHLSITGSQIWQNDKLPSANKLVANGVLALNARYSQIADNTTLRAGAINLTAGTALVKRGNINWSTVSTKTLEDNAELKPLAGRLNIEAGSGTLTIEPANRISAHTDLSIKTGGKLLLSAKGGNAGAPSAQVSSLEAKGNIRLVTGETDLRGSKITAGKNLVVATTKGKLNIEAVNNSFSNYFPTQKAAELNQKSKELEQQIAQLKKSSPKSKLIPTLQEERDRLAFYIQAINKEVKGKKPKGKEYLQAKLSAQNIDLISAQGIEISGSDITASKKLNLHAAGVLPKAADSEAAAILIDGITDQYEIGKPTYKSHYDKAALNKPSRLTGRTGVSIHAAAALDDARIIIGASEIKAPSGSIDIKAHSDIVLEAGQNDAYTFLKTKGKSGKIIRKTKFTSTRDHLIMPAPVELTANGITLQAGGNIEANTTRFNAPAGKVTLVAGEELQLLAEEGIHKHELDVQKSRRFIGIKVGKSNYSKNELNETKLPVRVVAQTAATRSGWDTVLEGTEFKTTLAGADIQAGVGEKARADAKIILKGIVNRIQSEEKLETNSTVWQKQAGRGSTIETLKLPSFESPTPPKLTAPGGYIVDIPKGNLKTEIEKLAKQPEYAYLKQLQVAKNVNWNQVQLAYDKWDYKQEGLTRAGAAIVTIIVTALTYGYGATAAGGVAASGSSTAAAAGTAATTTAAATTVSTATAMQTAALASLYSQAAVSIINNKGDVGKALKDLGTSDTVKQIVTSALTAGALNQMGADIAQLNSKVRTELFSSTGNQTIANLGGRLATNLSNAGISAGINTAVNGGSLKDNLGNAALGALVNSFQGEAASKIKTTFSDDYVAKQFAHALAGCVSGLVQGKCKDGAIGAAVGEIVADSMLGGRNPATLSDAEKHKVISYSKIIAGSVAALNGGDVNTAANAAEVAVVNNALNFDSTPTNAKKHQPQKPDKTALEKIIQGIMPAHAAGAMTNPQDKDAAIWISNIRNGITGPIVITSYGVYAAGWTAPLIGTAGKLAISTCMANPSGCTVMVTQAAEAGAGIATGAVTVGNAWEAPVGALSKAKAAKQAAPKETINNLANLAKAEQQILFRIAQRDTQLDAWKTGFNNRVRKGAGLLDASNIPITINGKTIKPVQAISLKGAPVYSGVSEQEIFALYRQMTGQNPNFRVLPDGRLANGIISTGEWAGTKIALRNFSKTENSTQARWTLDLQNPPSFIKGTKLELKFQ

SEQ ID NO: 2305 - protein, 580 aa, Neisseria
MKFFPAPCLLVILAVIPLKTLAADENDAELIRSMQRQQHIDAELLTDANVRFEQPLEKNNYVLSEDETPCTRVNYISLDDKTVRKFSFLPSVLMKETAFKTGMCLGSNNLSRLQKAAQQILIVRGYLTSQAIIQPQNMDSGILKLRVSAGEIGDIRYEEKRDGKSAEGSISAFNNKFPLYRNKILNLRDVEQGLENLRRLPSVKTDIQIIPSEEEGKSDLQIKWQQNKPIRFSIGIDDAGGKTTGKYQGNVALSFDNPLGLSDLFYVSYGRGLAHKTDLTDATGTETESGSRSYSVHYSVPVKKWLFSFNHNGHRYHEATEGYSVNYDYNGKQYQSSLAAERMLWRNRLHKTSVGMKLWTRQTYKYIDDAEIEVQRRRSAGWEAELRHRAYLNRWQLDGKLSYKRGTGMRQSMPAPEENGGDILPGTSRMKIITASLDAAAPFILGKQQFFYATAIQAQWNKTPLVAQDKLSIGSRYTVRGFDGEQSLFGERGFYWQNTLTWYFHPNHQFYLGADYGRVSGESAQYVSGKQLMGAVVGFRGGHKVGGMFAYDLFAGKPLHKPKGFQTTNTVYGFNLNYSF

SEQ ID NO: 2306 - protein, 56 aa, Neisseria
MMFAKHYQFIALGIMLLLYMLILYTTDFSNLTYWMLFFICFITGKILARLLEKSFK

SEQ ID NO: 2307 - protein, 100 aa, Neisseria
MTWVGGSGNAQQSSYYCEICESAGLNDTGNPDKSLGLPNNTFSNPPGWGATIGALAGSRIGMPEFGTFASHAIENFDWSWYRRYREIAETIEREYSGGLP

SEQ ID NO: 2308 - protein, 117 aa, Neisseria
MIELQLHELKLVSGGGPVTDNIAGNVANAATTKGGPTWGDLVAIPAAAAAVYYLPKNAYGAAGANGVYNVTRNWVNDAVNAPPYNGRPIFEIEHGLTAPATKADKSGNGYTDGTDYC

SEQ ID NO: 2309 - protein, 79 aa, Neisseria
MRDSMKNWKQFTFFVILVIACYQVLYFLSDMFLLDYINKYSWNLNFIQGTLNFFSIYLPYVFVSRIFRNTNQEKEYKND

SEQ ID NO: 2310 - protein, 384 aa, Neisseria
MSIHLDFGISPKTFRQTYLYQKPKLFKGAVRNLESASWKDINEIYQRADPTAPLFHLRKKGAIVPKEEYVESFDDLGKTRYRFIKSVIYEHMKNGASLVYNHINNEPFSDHIARQVARFAGAHTIVSGYLAFGSDESYKNHWDPRDVYAIQLFGKKRWQLTAPDFPMPLYMQQTKDTDISIPEHIDMDIILEAGDVLYIPRGWWHRPIPLGCETFHFAVGTFPPNGYNYLEWLMKKFPTIESLRHSFSDWEQDRTRINDTAAQIAAMIADPVNYEAFSEDFLGKERTDTAFHLEQFANPNATPLSDDVRLRLNANNLDTLEKGYLIGNGMKISVDELGKKVLEHIGKNEPLLLKNLLVNFNQGKYEEVRKLIYQLIELDFLEIL

SEQ ID NO: 2311 - protein, 347 aa, Neisseria
MSKKIKVGIVGATGYTGVELLRLLAAHPDVEVAAVTSRSEAGTAVADYFPSLRGVYGLAFQTPDEAGLEQCDIVFFATPNGIAMKDAPRLIEQGVRVIDLSADFRIRDIPTWEHWYGMTHAAPDLVSQAVYGLSELNREAVAQARLVANPGCYPTCVSLPLVPLLRQCRLKPGMPLIADCKSGVSGAGRKGNVGSLLCEAGDNFKAYGIAGHRHLPEIRQTIAGLQDGIAEGFVFTPHLAPMIRGMHATVYLHLSDGSDPETVLRDYYRDSPFVDILPTGSAPETRSVRGANLCRISIQQAAQSDVWVVLSVIDNLVKGAAGQAVQNMNIMFGLEETHGLDAIPLLP

SEQ ID NO: 2312 - protein, 680 aa, Neisseria
MMSPETRKQLKITDVSAKKLDKLNLHTAWDLVLHLPLRYEDETHIMPIKDAPIGVPCQVEGEVIHQEVTFKPRKQLIVQIADGSGSVLFLRFIHFYASHQKQTAVGKRIRAVGEIKHGFYGDEMIHPKIRDAEGGGLAESLTPVYPTVNGLNQPTLRRIIQTALDVTPLHDTLPDALLCRLKLPHLAESLRLLHSPPPSFTIHQLSDGTLPAWQRLKFDELLAQQLSMRLARQKRIGGTAAALGGDGTLTQALRQALPFALTDAQEKVVSEICRDMAQTYPMHRLLQGDVGSGKTIVAALSALTAIESGAQVAVMAPTEILAEQHFIKFKQWLEPLGIEVVRLFGSLRKKAKDEAKAKLADGSVKIAVGTHALFSDGVAFHNLGLTIVDEQHRFGVAQRLALKNKGREVHQLMMSATPIPRTLAMSFFADLDVSVIDELPPGRTPIKTRLVNNVRRAEVEGFVLGTCRKGRQAYWVCPLIEESETLQLQTAAETLARLQTALPELNIGLVHGRMKAAEKAEVMARFSSGGLNVLVATTVIEVGVDVPNAALMVIEHAERMGLAQLHQLRGRVGRGAAESVCVLLFAEPLGELAKARLKVIYEHTDGFEIARQDLNIRGPGEFLGARQSGVPMLRFAKLEEDLHLLEQARETAPMLIEQNPEIVEAHLARWLSGREGYLGV

SEQ ID NO: 2313 - protein, 147 aa, Neisseria
MSEELQPVFSIERLYVKDLSLEVPHAPQIFLEQGEPEVEMRVSTGSQKLEDGYYNVDVTVTVTAKLDNERTMFLNEVTQSGIFRLENIPEEDADLLLGVACPNILFPYAREAVSGTVTRAGFPPVLLAPINFEAIYQQQQEAEAAGA

SEQ ID NO: 2314 - protein, 85 aa, Neisseria
MQTVTMYTGPFCPYCAMAKRLLHAAGVGHIDEIRVDASPEAFAEMQQLSGQRSVPQIFIGETHVGGFTDLYRLQQEGGLDGLLNP

SEQ ID NO: 2315 - protein, 509 aa, Neisseria
MQNIFITFSGKTMLSGLPIPKDIARPPETILVNITPAETRVAVLEENNICELHIERNSEHSLVGNIYLGVVRRVLPGMQSAFIDIGLERAAFLHIVDVLEQRRNPEETQRIEHMLFEGQSVLVQVIKDPINTKGARLSTQISLAGRFLVHLPQEDHIGVSQRIEDDAERSSLRERLDKLLPENACRGYIIRTNAENATDEQLQSDIDYLTKVWEHIQEQAKIRPPETLLYQDLPLSLRVLRDMVGCDTQKILVDSTVNHGRMTRFAEQYVHGALGRIELFKGERPLFETHNVEQEISRALQPRVNLNFGSYLIIESTEAMTTIDVNTGGFVGARNFDETIFRTNLEACHTIARELRLRNLGGIIIIDFIDMAQESHREAVLQELAKALAFDRTRVTLHGFTSLGLVELTRKRSRENLNQVLCEPCPSCQGRGRLKTPQTVCYEIQREIVREARRYDAESFRILAAPNVIDLFLDEESQSLAMLIDFIGKPISLAVETAYTQEQYDIVLM

SEQ ID NO: 2316 - protein, 314 aa, Neisseria
MQENEYREDLAADAARQSVLPLLAALPLMILLTVWITHKAMRPVRKLSQSLEQRRINDLSALSVDNIPSEIRGFVTAINLLLKRADEDIRHRQRFVADAAHELRTPMTALPLQAERLNNMPLPPDAARQPAVLQQSIRRNKHLLEQLLALARSQSDEIPLTKTTFGLQSRFRQVLQELMPLALEKCQDIGVAVGGDVEVSADETEIYTLIKTFADNAVRYTPPEGRIDLGFTDEGKYLAVWVEDNGKGIPESERARVLDPFYRILGTEQQGTGLGLSIADTLAKKYGGYLELSDSRRFGRGLLIRALLDKETLK

SEQ ID NO: 2317 - protein, 437 aa, Neisseria
MLTFIGLLIIGVIVWLLLTEKVSPIIALILVPLFGALLAGFDVSQLKEFYSGGTKSVMQIVIMFMFSILFFGIMNDVGLFRPMIGGLIKLTRGNIVAVSVGTVLVSVVAQLDGAGATTFLLVVPALLPLYKRLHMNPYLLFLLLTSSAGLINLLPWGGPTGRVASVLGADVGELYKPLLTVQIIGVVFILALSLLLGVREKRRIVRELGALPAVADLIKPVPLSEEEQKLARPKLFWWNVLLFLAAMSLLFSGIFPPGYVFMLAATAALLLNYRSPQEQMERIYAHAGGAVMMASIILAAGTFLGILKGAGMLDAISKDIVHILPDALLPYLHIAIGVLGIPLELVLSTDAYYFGLFPIVEQITSQAGVAPEAAGYAMLIGSIVGTFVTPLSPALWMGLGLAKLSMGKHIRYSFFWAWGLSLAILASSIAAGIVPLP

SEQ ID NO: 2318 - protein, 52 aa, Neisseria
MIGAVSFESAHRDECPRAVPIPIYRLFRIGCRCEMTDGCRNGGRRKWEEMTD

SEQ ID NO: 2319 - protein, 190 aa, Neisseria
MIMAKKISILVGSLRRASFARKVALNAAEMFPEGWQAEIVEIGHLPLYNFDYDDPAVEDVPLPESYTAFRETIKASDGILFVTSENNRTIPACLKNAVDIGSKPNADVAWKNKPAGIISHSVGKMGGYSSQKNLRLALSYFDMPVTGQPEVFLGNSPTLFDENGKLIDSARDFVQSYINQFVGLIERNAK

SEQ ID NO: 2320 - protein, 469 aa, Neisseria
MNFPKTAASLLLLLASLAAHALDTGRIPQNEIAVYVQELDSGKVIIDHRSDVPVNPASTMKLVTAFAAFKTFGSNYRWATEFKSNGTVNDGTLDGNLYWAGSGDPVFNQENLLDAQKQLREQGILNITGHLMLDHSLWGEVGSPDDFEADSGSPFMTPPNPTMLSAGMVMVRAERNAAGSTDILTDPPLPHIFAQNNLKITASQAACPSIKKLMRASFSDNTLKLRGNIPESCLGKPVGVRMFALDELIRQSFTNHWLLGGGRISDGIGIADTPEGAQTLAVAHAKPMKEILTDMNKRSDNLIARSVFLKLGGDGKLPAVSEQAASAVRRELAVSGIDVADLVLENGSGLSRKERVTARMMAQMLETAYFSPFAQDFIDTLPIAGTDGTLRNRFKQSGGLLRLKTGTLNNVRALAGYWLGDKPMAVVVIINSGRAVSLLPDLDNFVANNIISGGDGWLDAKLMCKERRA

SEQ ID NO: 2321 - protein, 389 aa, Neisseria
MSEYLFTSESVSEGHPDKVADQVSDAILDAILAQDPKARVAAETLVNTGLCVLAGEITTTAQVDYIKVARETIKRIGYNSSELGFDANGCAVGVYYDQQSPDIAQGVNEGEGIDLNQGAGDQGLMFGYACDETPTLMPFAIYYSHRLMQRQSELRKDGRLPWLRPDAKAQLTVVYDSETGKVKRIDTVVLSTQHDPSIAYEELKNAVIEHIIKPVLPSELLTDETKYLINPTGRFVIGGPQGDCGLTGRKIIVDTYGGAAPHGGGAFSGKDPSKVDRSAAYACRYVAKNIVAAGLATQCQIQVSYAIGVAEPTSISIDTFGTGKISEEKLIALVREHFDLRPKGIVQMLDLLRPIYSKSAAYGHFGREEPEFTWERTDKAAALRAAAGL

SEQ ID NO: 2322 - protein, 67 aa, Neisseria
MNIMSTAGNIAKFPYSYHSVEKYSHLNSTLESLPVRFLQAKKFPHQAGLDCSGEPHRLFNRPPYFSF

SEQ ID NO: 2323 - protein, 298 aa, Neisseria; identical to SEQ ID NO: 284

SEQ ID NO: 2324 - protein, 354 aa, Neisseria
MLVLGIESSCDETGVALYDTERGLRAHCLHTQMAMHAEYGGVVPELASRDHIRRLVPLTEGCLAQAGASYGDIDAVAFTQGPGLGGALLAGSSYANALALALDKPVIPVHHLEGHLLSPLLAEEKPDFPFVALLVSGGHTQIMAVRGIGDYALLGESVDDAAGEAFDKTAKLLGLLYPGGAKLSELAESGRFEAFVFPRPMIHSDDLQMSFSGLKTAVLTAVEKVRAENGADDIPEQTRNDICRAFQDAVVDVLAAKVKKALLQTGFRTVVVAGGVGANRKLRETFGNMTVQIPTPKGKPKHPSEKVSVFFPPTAYCTDNGAMIAFAGAMHLGKGREVGAFNVRPRWPLSEIVR

SEQ ID NO: 2325 - protein, 395 aa, Neisseria
MTEHYKTLPEHELLIQKSLISNLNLWDWVFAVLVFAATVFVQTRSGMHMDIYETVMLWASAGIAVFLGWFFKPMRWFVPLSVLLAYAAVGLYGGDIKSAEIFLLRYFLSSQSAIMWQCAFVFFALFAYISGAVLASVKNVPTNTLLGMGTVFAWVSAVAGFTGLLVRWHESYLLRPDAGHIPVSNLYEVFILFLVITALMYLYYEGKFAIQKLGGFVFGFMAVVVGFVLWYSVSREAHTIQPLIPALQSWWMKIHVPANFIGYGAFCISAMLGIAELVSLRAEGKGGKLWLPPSALIDEVMYKAIAVGFLFFTIATILGALWAADAWGRYWSWDPKETWAFIVWLNYAVWLHLRLVAGWRGKVLAWWAIIGLFVTAFAFIGVNMFLSGLHSYGTL

SEQ ID NO: 2326 - protein, 671 aa, Neisseria; identical to SEQ ID NO: 165

SEQ ID NO: 2327 - protein, 207 aa, Neisseria
MKRLTLLAFVLAAGAVSASPKADVEKGKQVAATVCAACHAADGNSGIAMYPRLAAQHTAYIYHQTIGIRDGKRTHGSAAVMKPVVMNLSDQDILNVSAFYAKQQPKSGEANPKENPELGAKIYRGGLSDKKVPACMSCHGPSGAGMPGGGSEIQAYPRLGGQHQAYIVEQMNAYKSGQRKNTIMEDIANRMSEEDLKAVANFIQGLR

SEQ ID NO: 2328 - protein, 211 aa, Neisseria
MPMNLFQNAKFFTTINHLKDLPDTPLEIAFVGRSNAGKSSAINTLTNHVRLAYVSKTPGRTQHINFFELQNGNFMVDLPGYGYAQVPEAVRAHWVNLLGDYLQQRKQLIGLVLIMDARHPLKELDIRMLDFFHTTGRPVHILLSKADKLSKNEQIKTLSQVKKLLKPYSDRQNISVQLFSSLKKQGIDEANRTVGSWLDAADAAASSPEEN

SEQ ID NO: 2329 - protein, 798 aa, Neisseria
MIKKILTTCFGLVFGFCVFGVGLVAIAILVTYPKLPSLDSLQHYQPKMPLTIYSADGEVIGMYGEQRREFTKIGDFPEVLRNAVIAAEDKRFYRHWGVDVWGVARAAVGNVVSGSVQSGASTITQQVAKNFYLSSEKTFTRKFNEVLLAYKIEQSLSKDKILELYFNQIYLGQRAYGFASAAQIYFNKNVRDLTLAEAAMLAGLPKAPSAYNPIVNPERAKLRQKYILNNMLEEKMITVQQRDQALNEELHYERFVRKIDQSALYVAEMVRQELYEKYGEDAYTQGFKVYTTVRADHQKVATEALRKALRNFDRGSSYRGAENYIDLSKSEDVEETVSQYLSGLYTVDKMVPAVVLDVTKKKNVVIQLPGGRRVTLDRRALGFAARAVNNEKMGEDRIRRGAVIRVKNNGGRWAVVQEPLLQGALVSLDAKTGAVRALVGGYDFHSKTFNRAVQAMRQPGSTFKPFVYSAALSKGMTASTVVNDAPISLPGKGPNGSVWTPKNSDGRYSGYITLRQALTASKNMVSIRILMSIGVGYAQQYIRRFGFRSSELPASLSMALGTGETTPLKVAEAYSVFANGGYRVSSHVIDKIYDRDGRLRAQMQPLVAGQNAPQAIDPRNAYIMYKIMQDVVRVGTARGAAALGRTDIAGKTGTTNDNKDAWFVGFNPDVVTAVYIGFDKPKSMGRVGYGGTIAVPVWVDYMRFALKGKQGKGMKMPEGVVSSNGEYYMKERMVTDPGLTLDNSGIAPQPSRRAKEDDGGAAEGGRQAADDEVRQDMQETPVLPSNTGSKQQQLDSLF

SEQ ID NO: 2330 - protein, 371 aa, Neisseria
MRLFKSLKNPKKTDAKLPKKSSGLNNRAAIGIDIDQHSIKMVQLSGRSLNQIQLEKYVIAKLPKNIIQGNKVQNYDQLVTYLQQAYAKLGTSCKNIIASVPQNLATIEQLTYTDKDAELDLQGFVESSISEVSSISLEEANYDYQVLSQSAAGEAVLAVASRKDEIEPLIDAFNAAGMKLSALDVDIFGQYNAYALWINHFAPELAAEKVAIFGVYAAQTYALVIQDGKILYKQETSVSEEQLNQLIQRTYQVTEEKAEEIINSPQKPSDYQESVANYFNQQITQEIQRVLQFYYTTQTADDMTDIKHILLTGEAARQEGIAQTVASQTNADVQCVHPARYFADNLKTDKQQFELDAPTLTRAFGLAVRGL

SEQ ID NO: 2331 - protein, 199 aa, Neisseria
MNNLIKINLLPYREEMNKRKQQQFKTLMYGAVLTGVAAVAATYLFIDNMINNQSERNTLLETSIAHLDTELSEIQKLKQEKDAFLIKKNKIEELQLKRLQAAKILDSLNEAVPGSTYLTSLDAVTADSYRLSGRTSSDNRVAAMMRAMPNTGIFKQPELLSIKKNNSHQEFTLQATLQPIVKAAESKENPASGNAQEAN

SEQ ID NO: 2332 - protein, 215 aa, Neisseria
MASKSSKTNLDLNNLHLLNLPARLFIALLAVAAVLGLGYAGLFKSQMESLEEYEAKETELKNTYKQKSIDAASLNNLRDELASIRSAFDIMLKQLPTDAEIPNLVQELHQAGSSNGLRLDSVMPQPPVDDGPIKRLPYSISITGNYEQISQFTRDVGSLSRIITLESLKIAQSPENGGNPDGKSSILNLSAIATTYQAKSVEELAAEAAQNAEQK

SEQ ID NO: 2333 - protein, 181 aa, Neisseria
MKHYALLISFLALSACSQGSEDLNEWMAQTRREAKAEIIPFQAPTLPVAPVYSPPQLTGPNAFDFRRMETDKKGENAPDTKRIKETLEKFSLENMRYVGILKSGQKVSGFIEAEGYVYTVGVGNYLGQNYGRIESITDDSIVLNELIEDSTGNWVSRKAELLLNSSDKNTEQAAAPAAEQN

SEQ ID NO: 2334 - protein, 940 aa, Neisseria
MNTKLTKIISGLFVATAAFQTASAGNITDIKVSSLPNKQKIVKVSFDKEIVNPTGFVTSSPARIALDFEQTGISMDQQVLEYADPLLSKISAAQNSSRARLVLNLNKPGQYNTEVRGNKVWIFINESDDTVSAPARPAVKAAPAAPAKQQAAAPSTKSAVSVSEPFTPAKQQAAAPFTESVVSVSAPFSPAKQQAAASAKQQAAAPAKQQAAAPAKQQAAAPAKQTNIDFRKDGKNAGIIELAALGFAGQPDISQQHDHIIVTLKNHTLPTTLQRSLDVADFKTPVQKVTLKRLNNDTQLIITTAGNWELVNKSAAPGYFTFQVLPKKQNLESGGVNNAPKTFTGRKISLDFQDVEIRTILQILAKESGMNIVASDSVNGKMTLSLKDVPWDQALDLVMQARNLDMRQQGNIVNIAPRDELLAKDKALLQAEKDIADLGALYSQNFQLKYKNVEEFRSILRLDNADTTGNRNTLISGRGSVLIDPATNTLIVTDTRSVIEKFRKLIDELDVPAQQVMIEARIVEAADGFSRDLGVKFGATGKKKLKNDTSAFGWGVNSGFGGDDKWGAETKINLPITAAANSISLVRAISSGALNLELSASESLSKTKTLANPRVLTQNRKEAKIESGYEIPFTVTSIANGGSSTNTELKKAVLGLTVTPNITPDGQIIMTVKINKDSPAQCASGNQTILCISTKNLNTQAMVENGGTLIVGGIYEEDNGNTLTKVPLLGDIPVIGNLFKTRGKKTDRRELLIFITPRIMGTAGNSLRYVMKNFNGKLILIGLMGAGKTTLGRQMAQRLDYRFYDSDHEIAAAAGVPIPTIFEMEGEQGFRSRETAILKKLVILPHIVLSTGGGAVLKEENRALIRKSGTVVYLHAPPETLLERTRCDNSRPLLQVADPLAKLRELYAARDPVYRQTADFTVESANCRETVQTLLKRLSR

SEQ ID NO: 2335 - protein, 359 aa, Neisseria
MKTLTVHTPSHSYPIFIGNGLLPQAGSLLKPHLGKRAAIIANETVAPLYLGTLQTALDAAGVSHFSIILPDGEAHKNWQTLNLIFDGLMQNRAERKTTLIALGGGVIGDMVGFAAATYQRGAPFVQIPTTLLSQVDSSVGGKTAINHPLGKNMIGAFYQPQAVLADLDTLHTLPARELSAGMAEVIKYGALGDIGFFEWLEQHMPELMTLDREKLAQAVYRCCQMKADIVAQDETEQGIRAWLNLGHTFGHAIETEMGYGTWLHGEAIAAGCVLAARLSEQLGKTSAADTARLAALLEAAGLPSAPPVFAFEKWLEHMSHDKKVSGGIMRFIGLNRLGEANITEITDTDILRRTLQPYL

SEQ ID NO: 2336 - protein, 280 aa, Neisseria
MCQLLGMNCNTPTDIMFSFEGFRRRGGITDHHADGFGIGFFEGKGVRLFHDDKPSVNSPVADLVRAYQIKSENVIAHIRKASQGQTSLANTHPFMREMWGGYWLFAHNGHLIDFFPEQGEFFHPVGTTDSERAFCHILNRLRTRFAARPDDDTLFDAIAGLTHEIRKFGLFNFMLSDGIALFAHASTLLHYIVRQAPFGKARLLDDDVMVDFAEVTTPSDRVAVIATLPLTRDESWSQLAVDELVMFREGNIVRHDRPENPVYMSAEEGLEIARAAGVAV

SEQ ID NO: 2337 - protein, 154 aa, Neisseria
MKCPFCAHPDTRVADSRLMEERNAVRRRRHCPNCGKRFGTLETAELKMPAVIGPDKKRSPFNAQRLRNDLTAAARKSALTPEQIDETVRLTEHRLYTSGQRDIPSAALADMVLKELLRQDTEAAVRFAALHKRFDNPADFASWLAQAVKTGGKA

SEQ ID NO: 2338 - protein, 369 aa, Neisseria
MFSDTDISMMENALRLAALGRFSTSPNPRVGCVIAHGSQIVGQGFHVKAGEPHAEVHALRQAGEMAQGATAFVTLEPCSHYGRTPPCAEALVRAGVSRVVAAMRDPNPLVAGKGLALLEAAGIKTECGLLEHQARELNRGFLSRIERRRPFVRLKCAVSLDGKTALSDGSSFWITGEDARADVQVLRAESCAVLTGIGTVLADNPRLNVRAFPTLRQPARIVLDSRLRLPPNSHLVTDGQSPTYIATLERNEDRLHPYREHAHVRILMPSETADSKIDLHHLMRLLADEGFGEIMVEAGSELTSAFLAENLADEIVLYRSPKILGSGKDLFSLLENRAALSAPPLWTPVSSEILGHNIKTVFRKNGNAF

SEQ ID NO: 2339 - protein, 473 aa, Neisseria; identical to SEQ ID NO: 188

SEQ ID NO: 2340 - protein, 51 aa, Neisseria
MKIVLTTSMAGLGGTGTISSIAKWRAKTTPFSPTKSSAASGATFPIGKSST

SEQ ID NO: 2341 - protein, 413 aa, Neisseria; identical to SEQ ID NO: 7

SEQ ID NO: 2342 - protein, 391 aa, Neisseria
MLNTFLSPWPCFTQEEADAVSKVLLSNKVNYWTGNECREFEKEFAAFAGTRYAVALANGTLALDVALKAMGIGAGDDVIVTSRTFLASASCIVNAGANPVFADVDLNSQNISAETVKAALTPTTKAVIVVHLAGMPAEMDGIMALAKEHNLWVIEDCAQAHGAKYKGKSVGSIGHVGAWSFCQDKIMTTGGEGGMVTTNDKTLWEKMWSYKDHGKSYDAVYNHEHAPGFRWLHESFGTNWRMMEMQAVIGRIQLKRLPEWTARRRENAAKLAESLGKFSSIRLVEVADYIGHAQYKFYAFVKPEHLKDGWTRDRIVGELNARKVPCYQGSCSEVYLEKAFDNTPWRPKERLTNAVELGDTSLMFLVHPTLTDDEIAFCKKHIEAVLTEAAR

SEQ ID NO: 2343 - protein, 636 aa, Neisseria
MNLETLIALPRNIKKICFLIHDFLMIFIAFWFTQSLKADYSDEWFDFANWQSFLLTALLTITLFIRMGLYHAVTRFVSFRILTTALAGSLASAVLFFLNTLIFEERLRLALPIVYFLLLFVSVTGSRMVLRGLLSEHPKKQMIPVIIYGAGRSGRQLLEAVKQMREYSAAAFVDDDPKLWHTVIYDLAVYQPDAIAFLIERYGVEKILLAIPGATQEQRRRIINKLEAYPCEVLTIPGMKDLMDGKISIGTLKKISVSDLLGRDSVAPDDRLMSADIEGKTVMVTGAGGSIGSELCRQIIRRRPEKLLLFELSEFALYAIEKELRETCIQKRLDTEILPFLGSVQNRTLLEHVMTAFSVATVYHAAAYKHVPMVEFNTVEGIRNNIFGTLECALAATTSGVRTFVLISTDKAVRPTNTMGASKRMAELCLQALAAEPGQKTRFSMVRFGNVLGSSGSVVPLFEKQIAEGGPLTLTHPEITRYFMTIPEAAQLVIQAGAMGTGGDVFVLDMGESVKIIDLARQMITLSGLKPNTPEQPDGDIEILITGLRPGEKLYEELLIGDNVRKTGHPRIMTANETMLPWHELSALLDRIRAACDRYDQQAIRTLLINAPTGFAPSDGICDLLWVRETHRKNAV

SEQ ID NO: 2344 - protein, 430 aa, Neisseria
MQFSAFGEKFTQHSGILQLMDDLGDALKSDKPVNMLGGGNPARIPEIDQAFADIFSKLAAEHAVENIGNYSNPQGDAVLIDALTAFLNREYSWNLTADNIALTNGSQNAFFYLFNLFGGKFNLSDGTSAEKAILLPLAPEYIGYADVHVEGQHFVSVKPKIENVEHEGEAGFFKYRVDFDALENLPELKAGKIGAICCSRPTNPTGNVLTDGEMARLDALAREHGIPLIIDNAYGMPFPNIIYSDVTLNWHENIILCFSLSKVGLPGVRTGIIVAAPEVVKAVSSLNAIVNLAPTRFGAAIATPLLESGEMKRLADQVIRPFYRNQAQTAVSLLKRELGAYPMKIHKPEGAIFLWLWFENLPVSSQTLYEMLKAEGTLIIPGEHFFVGIDTQDYPHAGECIRMSIAQDAQTLEKGIAAIGKTVRKLYDNV

SEQ ID NO: 2345 - protein, 278 aa, Neisseria
MIDLHCHSTVSDGMLSPAEVVRLAHQNGCTLLALTDHDHTGGIAEARAEADKLGLRLINGVEISVTWRGRTIHVVGLDFDEQDENLQNLLAQVRKGRLKRLEAIAAKLEKKGIGGAYDGALALAANKEMVSRTHVAEFLIQAGHVKNKQQAFTKYLGDGKSCAVRHEWATLEDCVSAVNGAGGMAVIAHPMRYDLSATAKRNLFEEFKNLGGAGIEVHSGNCCKNDRLNYALLAERFGMLASAGSDFHRLNDFSGGILGACPELPENCKPVWEHFSRY

SEQ ID NO: 2346 - protein, 67 aa, Neisseria
MDTTLKYKAEALLGEPLLDEPVRPESWECCGSDCGEACIQTIYWADKAKYDVQRQKLKEAGWSDDAV

SEQ ID NO: 2347 - protein, 123 aa, Neisseria
MAAYGVSDGIFTFTEQAVRIHRRFFGNFGYGGGRCYNNGLFLQGNIMEATVYLEDNEYIALCDLLKLVGLAESGGQAKAFIAEGLVLRNGETETRKTAKIRGGEVIEFDGARLEIADGYDPEV

SEQ ID NO: 2348 - protein, 1144 aa, Neisseria
MTEPTYIPLRLHTEFSITDGMVRIKKLIAKAQEYGLPALGISDLMNEFGLVKFYKACRSAGIKPIGAADVRIGNPDAPDKPFRAMLIIRNDAGYLRLSELLTAAYVGKDRNVHHAELNPEWLENGDNSGLICLSGAHYGEVGVNLLNGNEDAARTAALKYAAWFPDAFYMELQRLPERPEWEACVSGSVKLAEELGLPVVATHPTQFMSRDDFNAHEARVCIAGGWVLTDKKRPRDFTPGQFFIPPETMAERFADLPEALENTVEIAKRCNLHITLGKNFLPLFPTPDGLSLDDYLIKLSNEGLQERMVQLYPDEAERAAKMPEYQERLDFELNIIIQMKFPGYFLIVQDFINWAKTHGCPVGPGRGSGAGSLVAYSLKITDLDPLKYALLFERFLNPERVSMPDFDVDFCQSNRGRVIEYVREKYGAEAVSQIVTFGTMSSKAVIRDVGRVLELPFMLCDKLSKLIPLEANKPLSLEKAMETEPQIQELIEAEEADELITLAKKLEDLTRGLGMHAGGVLIAPGKISDYSPVYQADESASPVSMYDKGDVEDVGLVKFDFLGLRNLTIIEMAQNNIKNTTGDIIDVGKIPLDDQVAYQIFRDANTTAVFQFESTGMKKMLKTAHTTKFEELIAFVSLYRPGPMDNIPDFVARMKGQEFQYIHPLLEGILAPTYGIMVYQEQVMQAAQIIGGYSLGGADLLRRAMGKKKPEEMVKHREIFAEGAAKQGISREKSDEIFNYMEKFAGYGFNKSHAAAYALISYQTAWLKAHYPAEFMAATMSSELDNTDQLKHFYDDCRANGIEFLPPDINESDYRFTPYPDMKIRYALGAIKGTGEAAVESITAARQSGGKFTGLLDFCERVGKEHMNRRTLEALIRGGAFDSIEPNRAMLLANIDLAMDNADQKAANANQGGLFDMMEDAIEPVRLIDAPMWSESEKLAEEKTVIGFYLSGHPFGPYAQEVRQIAPTKLDRLKPQDSVRLAGFVTAVRTMMGKRGKIAFVSLEDLSGQVEIMVGGQTLENCADCLKADQVLIIESKVSRDDYGGGDGLRILANQVMTLQTARERYARSLSLALAPHHDIGGLVRLLAAHQLPDTPRIPLQLSYANEKASGRLQVPPKWTVTPSSALFGELETLLGSRSVRVNW

SEQ ID NO: 2349 - protein, 310 aa, Neisseria
MLSQLEYGIAKENRPNRQADRFAGSVLPLAASLTHKPNIMKPIPTDTFQPAILPQAFETEIKSTCTGRIYRIQTATLGEIPSEGYPVLFVLDGEAFFPALFNIMQSLMNNPVTRSNAPCLIVGIGYTTGSVRDLAQRAADYTPPLGDNATADERQQFGQADRFAAFIDSELTAFLESRYTLNRNETAVFGHSFGALFGLYSLLSHRRFRRHWLVSPSIWWHNRRILDFMPSENRLNGIDVCLNIGALERGSDCKRREERDMAGQAEQMAAELDRHGAAVFFREYPNADHGNVPFYSLTDCVEYLRKAWQR

SEQ ID NO: 2350 - protein, 708 aa, Neisseria
MGQFMSVFRINMTAATVLAALSSSVFAAQTEGLETVHIKGQRSYNAIATEKNGDYSSFAATVGTKIPASLREIPQSVSIITNQQVKDRNVDTFDQLARKTPGLRVLSNDDGRSSVYARGYEYSEYNIDGLPAQMQSINGTLPNLFAFDRVEVMRGPSGLFDSSGEMGGIVNLVRKRPTKAFQGHAAAGFGTHKQYKAEADVSGSLNSDGSVRGRVMAQTVGASPRPAEKNNRRETFYAAADWDINPDTVLGAGYLYQQRRLAPYNGLPADANNKLPSLPQHVFVGADWNKFKMHSHDVFADLKHYFGNGGYGKVGMRYSDRKADSNYTFAGSKLNNTGQADVAGLGTDIKQKAFAVDASYSRPFALGNTANEFVIGADYNRLRSTNEQGRSTLSKSVALDGFRALPYNGILQNARAGNKGFNHSVTEENLDETGLYAKTVFRPLEGLSLIAGGRVGHHKIESGDGKTLHKASKTKFTSYAGAVYDIDGSNSLYASASQLYTPQTSIGTDGKLLKPREGNQFEIGYKGSYMDDRLNTRVSFYRMKDKNAAAPLDSNNKKTRYAALGKRVMEGVETEISGAMTPKWQIHAGYSYLHSQIKTASNSRDEGIFLLMPKHSANLWTTYQVTSGLTIGGGVNAMSGITSSAGIHAGGYATFDAMAAYRFTPKLKLQINADNIFNRHYYARVGSESTFNIPGSERSLTANLRYSF

SEQ ID NO: 2351 - protein, 219 aa, Neisseria
MTTPKLIIFDWDGTLADTTQPIIDTMRRSFAECGFPPPEAERVRSLIGYSLPEIIRTLLEMPSETAVADITRTYSAHYLNPNNRNMSLFPDALPCLDKLKAQGYWLAVATGKGRAGLDNAISQTATGGYWLATACAGEYPSKPSPEMVFGICGELGLDPKEALVVGDTAHDLHMAANAGAAAVGVATGAHSREQLLSAPHLAVLDGLSELPGFLAQHYA

SEQ ID NO: 2352 - protein, 322 aa, Neisseria
MNEKTIILANPRGFCAGVDRAISIVERALEEFGAPIYVRHEVVHNKFVVDNLREKGAVFIEDLAEVPPGATLVYSAHGVSKAVRQEAAERGFRVFDATCPLVTKVHKEVARLDAQDCEIIMIGHKGHVEVEGTMGQLAPGKMLLVETVGDVAKLEVRNPDKLAYVSQTTLSVDETKDIIAALNARFPNIRNPHKEDICYATTNRQTAVKELAEQCDIVIVVGSPNSSNSNRLREVAASRGIDAYMVDNAGYLQRAWFEGKNKVGVTAGASAPEVLVREVLATIRGWGHETVREGEGAEESIVFVLPKELRREGETKPDLCKR

SEQ ID NO: 2353 - protein, 175 aa, Neisseria
MVLFYRLLKNMSSSVSSKTRYWVLALAAIVLDQWSKWAVLSSFQYRERVNVIPSFFDLTLVYNPGAAFSFLADQGGWQKYFFLVLAVAVSAYLVRAILRDEFATLGKTGAAMIIGGALGNVIDRLIHGHVVDFLLFYWQNWFYPAFNIADSFICVGAVLAVLDNIVHRKTQEEKY

SEQ ID NO: 2354 - protein, 929 aa, Neisseria
MTDYSKTVNLLESPFPMRGNLAKREPAWLKSWYEQKRYQKLREIAKGRPKFILHDGPPYANGDIHIGHAVNKILKDIIIRSKTQAGFDAPYVPGWDCHGLPIEVMVEKLHGKDMPKARFRELCREYAAEQIARQKKDFIRLGVLGDWDHPYLTMDFKTEADTVRMLGEIYKSGYLYRGAKPVQFCLDCGSSLAEAEVEYKDKISPAIDVAYLFKDTAALAAAFGLAGFEGKAFAVIWTTTPWTLPASQAVSAGADVVYQLIDTPKGKLVLAKDLAEDALKRYGFSDGIAILAETTGDKLENLHMNHPFLERDIPMLNGEHVTTDAGTGLVHTAPAHGLEDYAVCNKYGIELYNPVNAEGRYIGETPRVAGMRVWEANPVILQWLEETGNLLASSKIEHSYAHCWRHKTPLIYRATGQWFVGMDKAGADGKTLRDKAIKAVDDTEFFPSWGRARLEAMIEGRPDWVVSRQRYWGTPMTFFVHKETGELHPNSAELLEKVALKIEEKGIEAWFSLDKSELLSAEDCENYDKLSDTMDVWFDSGSTHYSVVKQREELEWPADLYLEGSDQHRGWFQSSMLTGCASSMGRAPYKQLLTHGFVVDGEGKKMSKSIGNVVAPQEVYNEFGADILRLWAASTDYSGELAISKEILKRVTESYRRIRNTLSFLFANLSDFNPIEDAVQQADMVEIDRYAVVLARQLQECLAGDYYPRYAFHFAVKDIVSFCSEDLGAFYLDILKDRLYTTKADSHARRSAQTALYHITRSLVLLIAPILCFTGEEAWDIIGGGEEDSVLFHTWHEFPTINEKTEAELVKKWTAIREAREAVTAAIEPLRADKTVGSSLQAEAEITAPEEMAGYLNALGEELRFALLVSKAEVKVGSELAVAAKASDGEKCERCWHYTRDVGAVAGYETVCKRCAENVGGEGETRHYA

SEQ ID NO: 2355 - protein, 306 aa, Neisseria
MRIRLGRHNAPDFPQGAAVTIGNFDGVHLGHKHILQKLRLEADARGLPVVTVVFEPQPKEFFALRTGRMPPCRISPLRTKLELLEGTGCVDAVWVLRFDQNFSEISAQGFIDRLLRQTLNTRYLLVGDDFRFGAGREGCFELLAQQPDMQTERTPSVIVEDIRTSSTAVRQALSDGNLAYAKKLLGHDYVLSGRVVHGRKLGRTLNAPTANIRLPRHRYALGGVFVVEADGAFGTRRGVASFGFNPTVDSGCSQKLEVHLFDFQGDLYGQGLNVRFLHKLRDEEKFDGMEELKRQIEADMEAARRW

SEQ ID NO: 2356 - protein, 431 aa, Neisseria
MSVIQDLQSRGLIAQTTDIEALDALLNEQKIALYCGFDPTADSLHIGHLLPVLALRRFQQAGHTPIALVGGATGMIGDPSFKAAERSLNSAETVAGWVESIRNQLTPFLSFEGGNAAIMANNADWFGSMNCLDFLRDIGKHFSVNAMLNKESVKQRIDRDGAGISFTEFAYSLLQGYDFAELNKRHGAVLEIGGSDQWGNITAGIDLTRRLHQKQVFGLTLPLVTKSDGTKFGKTEGGAVWLNAKKTSPYQFYQFWLKVADADVYKFLKYFTFLSIEEIDAIEAKDKASGSKPEAQRILAEEMTRLIHGEEALAAAQRISESLFAEDQSSLTESDFEQLALDGLPAFEVSDGINVVEALVKTGLASSNKEARGFVNSKAVLLNGKPAEANNPNHAAERPDDACLLNGEHKRFGKYTILRRGKRNHALLVWK

SEQ ID NO: 2357 - protein, 623 aa, Neisseria
MSQALPYRPDIDTLRAAAVLSVIVFHIEKDWLPGGFLGVDIFFVISGFLMTTILHREMSGGGGRFSLKAFYIRRIKRILPAFFAVLAATLAGGFFLFTKDDFFLLWKSALTALGFASNLYFARGKDYFDPAQEEKPLLHIWSLSVEEQFYFVFPILLLLVARKSLRVQFGFLAALCALSLAASFIPSALDKYYLPHLRACELLIGSLTAVWMRCRQPAVGRRCAAVGALFAVCILSTCLFSYSEQTAYFPGPAALIPCLAVAALIYFNHYEHPLKKFFQSKITVAAGLISYSLYLWHWPILAFMRYIGPDNLPPYSPAAAVVLILLLSLFSYHCIEKPFKKWQGSFAQSVLWIYALPMLILGAGSFFAMRLPFMAQYDRLGLTRSNTSCHNNTGKQCLWGDTEKQPELLVLGDSHADHYKTFFDAVGKKEKWSATMVSADACAYVEGYASRVFQNWAACRAVYRYAEEHLPRYSKVVLAMRWGSQMPENSRSLAYDAGFFQKFDRMLHKLSSEKQAVYLMADNLASSYNVQRAYILSSRIPGYRQALRPDDESTLKANARIRELAAKYPNVYIIDAAAYIPADFQIGGLPVYSDKDHINPYGGTELAKRFSEKQRFLDTRHNH

SEQ ID NO: 2358 - protein, 84 aa, Neisseria
MIFGVSRTAGMQPHQNKLPPAFPICPPRFLQNKPPAPPLREAVRHSEYPDPRYEMTFQTAFAPPRFEYSGLTLNQDKATKPQTV

SEQ ID NO: 2359 - protein, 363 aa, Neisseria
MSLKCGIVGLPNVGKSTLFNALTQSGIEAANYPFCTIEPNVGIVEVPDPRMAELAKIVNPQKMQPAIVEFVDIAGLVAGASKGEGLGNQFLANIRETDAIVNVVRCFDDDNIVHVAGRVDPIADIETIGTELALADLASVEKAIVREEKRARSGDKDAQKLVDLCKKLLPHLDEGKPVRSFGLDAEERAMLKPLFLLTAKPAMYVGNVAEDGFENNPHLDRLKELAAKENAPVVAVCAAMESEIAELEDDEKAEFLAEMGLEEPGLNRLIRAGYDLLGLQTYFTAGVKEVRAWTIHKGDTAPQAAGVIHTDFERGFIRAQVISYDDFVSLGGEAKAKEAGKMRVEGKEYVVQDGDVMHFLFNV

SEQ ID NO: 2360 - protein, 558 aa, Neisseria
MSFKTDAEIAQSSTMRPIGEIAAKLGLNADNIEPYGHYKAKINPAEAFKLPQKQGRLILVTAINPTPAGEGKTTVTIGLADALRHIGKDAVIALREPSLGPVFGVKGGAAGGGYAQVLPMEDINLHFTGDFHAIGAANNLLAAMLDNHIYQGNELNIDPKRVLWRRVVDMNDRQLRNIIDGMGKPVDGVMRPDGFDITVASEVMAVFCLAKDISDLKERLGNILVAYAKDGSPVYAKDLKANGAMAALLKDAIKPNLVQTIEGTPAFVHGGPFANIAHGCNSVTATRLAKHLADYAVTEAGFGADLGAEKFCDIKCRLAGLKPDAAVVVATVRALKYNGGVERANLGEENLDALEKGLPNLLKHISNLKNVFGLPVVVALNRFVSDADAELAMIEKACAEHGVEVSLTEVWGKGGAGGADLARKVVNAIESQTNNFGFAYDVELGIKDKIRAIAQKVYGAEDVDFSAEASAEIASLEKLGLDKMPICMAKTQYSLSDNAKLLGCPEDFRIAVRGITVSAGAGFIVALCGNMMKMPGLPKVPAAEKIDVDAEGVIHGLF

SEQ ID NO: 2361 - protein, 143 aa, Neisseria
MGSNAWLFWALASAGFASLTAIFAKMGLQGIDSDFATFIRTLVILAALLLFLTYTGKWQGVNGFTGRNWTFLILSGLATGASWLAYFKALQLGNASQVAPIDKFSLVLVALMAVVFLDERPNTQEWIGLGLVTAGVLVLALKR

SEQ ID NO: 2362 - protein, 231 aa, Neisseria
MKAMILAAGRGERMRPLTDTTPKPLLDVAGKPLIGWHLCRLKQAGFTEIVINHAWLGRQIEDALGDGSAYGVNIAYSPEPAGGLETAGGIAQALPLLGGQPFLVVNGDVLTDIDFTAAFQTASSLPEHISAHLWLVENPPHNPDGDFSLLPDSSVRPEVNGGNGLTFSGVGIYRPEMFDGIEAGSVAKLAPVLRGEMRQNRVSGQKHTGLWLDVGTVCRLKEAQALAGAWK

SEQ ID NO: 2363 - protein, 166 aa, Neisseria
MADLQKNFQTSFRDAMASCAAGVHVITTDGAAGRYGITMTAVAPVTDEPPTVMLCINRSARIIPILSENGSLCINTLADEHQDVAEHFAGLTGLSPEERFAYHIWHRGKTGQLEIEGALAHLHGHIVGKHEIGTHFVFYVRLDEIKNCGCKRPALLYFRRQFRFLD

SEQ ID NO: 2364 - protein, 146 aa, Neisseria
MPTQSKHASINIGLIQAREALMTQFRPILNQANITDQQWRIIRLLAENGTLDFQDLANQACILRPSLTGILTRLEKAGLVVRLKPSNDQRRVFLKLTAEGEKLYEEIGEEVDERYDAIEEVLGREKMLLLKDLLAELAKIEDALNS

SEQ ID NO: 2365 - protein, 40 aa, Neisseria
MRFIAYCCYMFVLLYNGCIKIYAHRLSRRFESLIFDNLET

SEQ ID NO: 2366 - protein, 169 aa, Neisseria
MKKKLLSGIKFAVQTALVFLLVSLFLDWIRKPEEPAGAAGRPLTLLSGQRLTLGQFSRDKAVLVYFWGSWCGVCRYQSPIIDDLAADGVPVVGVAVRSGSSAEVAAYMAKRGLGFPTVNDEDGGLARSWRIVATPAVVLVKNGKMVHYTTGISSYWGLRARIFQADVFG

SEQ ID NO: 2367 - protein, 359 aa, Neisseria
MNIQNIRTLLDTVAVPNTARTLGGEKAVRSVEQRSDGIHIALHFGFPVAHIASETADRIQEILMPETGDTHIHLSMDTEIGTHKVQPGVTTIKGVKNIIAVASGKGGVGKSTTTANLAAAMARMGARVGVLDADLYGPSQPTMLGVDDRKPDQKNQKLIPVESSDGIQVMSIGFLVDTDQAVVWRGPMVSQALQQLMFQSEWDEVDYLFIDLPPGTGDIQLTLSQRIPVTGSVIVTTPQDIALIDARKAVDMFRKVNIPILGVLENMSVHICTNCGHSEALFGTDGGKDFAARLNVPLLGQLPLSLPVREAMDGGTPAQLFDEHPAIARIYTDAAFQIALSIADKGKDFSSRFPKIVVE

SEQ ID NO: 2368 - protein, 114 aa, Neisseria
MGIPESSGIPESSGIPESSGIPESSGIPESSGIPESSGIPESSGIPESSGIPESSGIPESSGIPESSGIPESSGIPESSGIPESSGIPESSGIPEPSFPRRRESRPVGAETYRV

SEQ ID NO: 2369 - protein, 377 aa, Neisseria
MSTPALLVLADGSVFHGTSIGYEGSTSGEVVFNTSMTGYQEILTDPSYCKQIVTLTYPHIGNTGTNAEDEESRSVYAAGLIIRDLPLLHSNFRASESLHDYLVRNKTVAIADIDTRRLTTLLREKGAQGGAILTGADATIEKAQELIAAFGSMVGKDLAKEVSCTETYEWTEGEWALGKGFVTPDEQPYHVVAYDFGVKTNILRMLASRGCRLTVVPAQTSAEDVLALNPDGVFLSNGPGDPEPCTYAIKAVQKLIESGKPIFGICLGHQLISLAIGAKTLKMRFSHHGANHPVQDLDSGKVVITSQNHGFAVDADTLPANARITHKSLFDNTLQGIELTDKPVFCFQGHPEASPGPQDVGYLFDKFIGNMKAAKRA

SEQ ID NO: 2370 - protein, 91 aa, Neisseria
MPADRYATGNGFTGIIRTRHQTFKRHRSAHRRNGQNPIGLPARSRWQPAGNQQLLIFRRLMQNKKQPAQAVFLAASLTPTAAPSSLPVGKR

SEQ ID NO: 2371 - protein, 86 aa, Neisseria
MPSPRPSPTGEGEGCSRFCGCRRFERQLRFAAVVSGHLKNKKQPAQPVFLAKPLIPTATTSSLPWERVRERATNCKAYTNSNPTTE

SEQ ID NO: 2372 - protein, 129 aa, Neisseria
MSTHEKLLTADNPVLHQRAKAMRQEMSEAEAKLWQHLRAGRLNGYKFRRQQPMGNYIVDFMCVTPKLIVEADGGQHAEQAVYDHARTAYLNSLGFTVLRFWNHEILQQTNDVLAEILRVLQELEKQYAQ

SEQ ID NO: 2373 - protein, 90 aa, Neisseria
MPEISTAGIFQAAFIARQVEQTPRTFFQTTFELIGRECAARHARGGLGLQGKWRTRAYVPHIPYIRATACYDTGVSIYKLGFSKPNILDN

SEQ ID NO: 2374 - protein, 213 aa, Neisseria
MSIPINFNNLKYLLNDMRNKNRIIEAFPFNYNQRQYAVILTRYKPDEPRPDDYAQAKLEFFNLNSENSIFAYADFYEVHFKSATDFINFFKINVQAGAAKIREIFQSFSNLFADFIPTQTKKDLDIIYKKIVATRLEPNSPNTIYCYDVRRNGKDKAGKPNRRSVENSEKAKILRPELYEKFKADSNYSFFFSDNPSDEKTDAEIIREVTNRQ

SEQ ID NO: 2375 - protein, 1071 aa, Neisseria
MPKRTDLKSILIIGAGPIVIGQACEFDYSGAQACKALREEGYKVILVNSNPATIMTDPEMADVTYIEPIMWQTVEKIIAKERPDAILPTMGGQTALNCALDLARNGVLAKYNVELIGATEDAIDKAEDRGRFKEAMEKIGLSCPKSFVCHTMNEALAAQEQVGFPTLIRPSFTMGGSGGGIAYNKDEFLAICERGFDASPTHELLIEQSVLGWKEYEMEVVRDKNDNCIIICSIENFDPMGVHTGDSITVAPAQTLTDKEYQIMRNASLAVLREIGVDTGGSNVQFAVNPANGEMIVIEMNPRVSRSSALASKATGFPIAKVAAKLAVGFTLDELRNDITGGKTPASFEPSIDYVVTKIPRFAFEKFPAADDRLTTQMKSVGEVMAMGRTIQESFQKALRGLETGLCGFNPRSEDKAEIRRELANPGPERMLFVADAFRAGFTLEEIHEICAIDPWFLAQIEDLMKEEKAVSDGILSDLDFAALRRLKRKGFSDKRLAQLLNVSEKEVREHRYALKLHPVYKRVDTCAAEFATETAYLYSTYEEECESRPSDRKKVMILGGGPNRIGQGIEFDYCCVHAALALRESGFETIMVNCNPETVSTDFDTSDRLYFEPLTLEDVLEIVRTENPWGVIVHYGGQTPLKLANALVENGVNIIGTSADSIDAAEDRERFQKVLNDLGLRQPPNRIAHNEEEALVKAEEIGYPLVVRPSYVLGGRAMQVVHSAEELQKYMREAVQVSEDSPVLLDFFLNNAIEVDVDCVSDGKDVVIGGIMQHVEQAGIHSGDSGCSLPPYSLSEEIQDEIRRQTKAMAYALGVVGLMNVQFAVQDGVVFVLEVNPRASRTVPFVSKATGVPLAKVGARCMAGISLKEQGVEKEVVPDFYAVKEAVFPFIKFPGVDTILGPEMRSTGEVMGVGASFGEAYYKAQLGAGERLNPTGKIFLSVREEDKERVIKTAKNFQVLGYGICATRGTAQYLTEHGLIVQTINKVPEGRPHIGDALKNGEIALVVNTVSSDPQSVSDSHIIRQSALQQRVPQYTTTAGGEAMSEGAKSRDHLGVYSVQELHGRLKNRN

SEQ ID NO: 2376 - protein, 299 aa, Neisseria
MKTNSEELTVFVQVVESGSFSRAAEQLAMANSAVSRIVKRLEEKLGVNLLNRTTRQLSLTEEGAQYFRRAQRILQEMAAAETEMLAVHEIPQGVLSVDSAMPMVLHLLAPLAAKFNERYPHIRLSLVSSEGYINLIERKVDIALRAGELDDSGLRARHLFDSRFRVIASPEYLAKHGTPQSTEELAGHQCLGFTEPGSLNTWAVLDAQGNPYKISPHFTASSGEILRSLCLSGCGIVCLSDFLVDNDIAEGKLIPLLAEQTSDKTHPFNAVYYSDKAVNLRLRVFLDFLVEELGNNLCG

SEQ ID NO: 2377 - protein, 192 aa, Neisseria
MNILLLDGGKAFGHSHGGLNRTLHKKAKEVLTALGHNVQETVIDAGYDVEAEIEKFVWMDAVIWQMPGWWMHEPWTVKKYIDEVLTAGHGKLYQSDGRHSVNPTEGYGTGGLLQGKKHMISLTWNAPIEAFTREGDFFEGKGVDVLYMHFHKANEFLGMTRLPTFLCNDVVKNPQVEKYLADYQAHLEKVFG

SEQ ID NO: 2378 - protein, 128 aa, Neisseria
MTYSGLNLNQDKATKPQTVQIVRQGEATLYWFLLIHYRFRRERRETQSLLMTRNTLKFIPFWSYKHITYAIFLYSRLPENSGQEYLTQRKAEKATKNNLHLSRLVSPTLGVQTIQSFRLPLFVYKINF

SEQ ID NO: 2379 - protein, 346 aa, Neisseria
MDISDFDFTLPEKLIAQHPPEVRGSSRLLVALPDMPLQDRVFGDLPDYVEAGDVLVFNNTKVMKARLFGQKDSGGRIEALIERVLDNHTALAHIRSSKSPKPGMGLVFEGGIRAVTVGREGELFCLRFEGGETVYELLEQNGHLPLPPYIERAADADDDSRYQTVYAKYQGAVAAPTAGLHFTEELLHRLKDKGAVTAEVTLHVGAGTFQPVRVDKIEEHKMHSEWFEVPSETAAAVEAAKARGNKVWAVGTTSMRALESAARATGRLKAGQGDTDIFITPGYRFNVVDRLVTNFHLPKSTLLMLVSAFSGMGHIRAAYRHAVEREYRFFSYGDAMVLGRNEGVVR

SEQ ID NO: 2380 - protein, 151 aa, Neisseria
MDLRKLKKLIDLVEESGIAEIEVTEGEEKVRITRTIAAAPVYAAPVPAAAPAVTPAAAPVAASAPAAAPAARDLSDAQKSPMVGTFYRAPGPNAAPFVEVGQQVKAGDTLCIIEAMKLMNEIEAEKSGTVKEILVENGTPVEFGEPLFIIG

SEQ ID NO: 2381 - protein, 453 aa, Neisseria
MLKKVLIANRGEIALRVLRACREMGIATVAVHSEADKDSLHVKLADESVCIGPAASAQSYLNVPAIIAAAEVSCADAVHPGYGFLAENADFAEQVEQSGFTFIGPKPDTIRLMGDKVSAKHAMIAAGVPCVPGSDGALPDDGEEILKIADKVGYPVIIKASGGGGGRGMRVVEKKEDLLQSVEMTKAEAGAAFGNPMVYMERYLQRPRHVEIQVIADEHGNAIYLAERDCSLQRRHQKVIEEAPAPFITEKERAKIGNACADACKRIGYRGAGTFEFLYEDGEFFFIEMNTRVQVEHPVTELITGVDIVQEQLRIAAGLPLQYKQKDIQVEGHAFECRINAEDPYNFIPSPGLIESCHLPGGFGIRVDSHIYQGYRIPPYYDSLIGKICVHGKTREQAMAKMRVALAELAVTGIKTNTPLHRDLFADAGFQKGGVSIHYLEHWLEDRKAKQDK

SEQ ID NO: 2382 - protein, 295 aa, Neisseria
MPYQQITVNVNDAVAERLADALMEHGALSAAIEDAYAGTQNEQAIFGEPGMPAEQIWQQSKVIALFGEHDEAAAIIQTATQECGLKDLAYTGETIEDQDWVRLTQSQFDPIRISDRLWITPSWHEVPEGSAVNLRLDPGLAFGTGSHPTTRLCLKWLDTQLKNGESVLDYGCGSGILTIAALKLGAGFAVGVDIDEQAVRAGKDNAAQNNVDAQFFLPDGLPQGQFDVVVANILANPLRMLGEMLAARTKQGGRIVLSGLLDEQAEELGGIYSQWFDLDPAETEEGWARLSGVKR

SEQ ID NO: 2383 - protein, 187 aa, Neisseria
MQDKNNLCWLDMEMTGLNPETDRIIEVAMIITDSDLNVLAQSEVYAVHQSDDVLNKMDEWNTATHGRTGLTQRVRESSHTEAEVEQKLLDFMSEWVPGRATPMCGNSIHQDRRFMVKYMPKLENYFHYRNLDVSTLKELAKRWNPPVAKSVVKRGSHKALDDILESIEEMRHYREHFLISAPRAEAQ

SEQ ID NO: 2384 - protein, 427 aa, Neisseria
MNRNEILFDRAKAIIPGGVNSPVRAFGSVGGVPRFIKKAEGAYVWDENGTRYTDYVGSWGPAIVGHAHPEVVETVCEAALGGLSFGAPTEGEIVIAEEIAKIMPSVERLRLVSSGTEATMTAIRLARGFTGRDKIIKFEGCYHGHSDSLLVKAGSGLLTFGNPSSAGVPADFTKHTLVLEYNNIAQLEEAFAQSGNEIACVIVEPFVGNMNLVRPTEAFVKALRGLTEKYGAVLIYDEVMTGFRVALGGAQSLHGITPDLTTMGKVIGGGMPLAAFGGRKDIMECISPLGGVYQAGTLSGNPIAVAAGLKTLEIIQREGFYENLTARTEQLVQGFRTAADAAGIEFTADSVGGMFGLYFAAHAPRNYADMARSNIEGFKQFFHGMLDRNVAFGPSAYEAGFVSAAHTPELIDETVAVAVEVFKAMAE

SEQ ID NO: 2385 - protein, 72 aa, Neisseria
MPSERQVSGLEAESPILSFFRLRQGFARFFADHANRIPDDGTLVFFHFMCKAVVSDDSLPVVIHTPLPMSAF

SEQ ID NO: 2386 - protein, 442 aa, Neisseria
MKKVFIRTFGCQMNEYDSDKMLAVLAEEHGGIEQVTQADEADIILFNTCSVREKAQEKVFSDLGRVRPLKEKNPGLIIGVAGCVASQEGENIIKRAPYVDVVFGPQTLHRLPKMIVDKETSGLSQVDISFPEIEKFDHLPPARVEGGAAFVSIMEGCSKYCSFCVVPYTRGEEFSRPLNDVLTEIANLAQQGVKEINLLGQNVNAYRGEMDDGEICDFATLLRIVHEIPGIERMRFTTSHPREFTDSIIECYRDLPKLVSHLHLPIQSGSDRVLSAMKRGYTALEYKSIIRKLRAIRPDLCLSSDFIVGFPGETEREFEQTLKLVKDIAFDLSFVFIYSPRPGTPAANLPDDTPHEEKVRRLEALNEVIEAETARINQTMVGTVQRCLVEGISKKDPDQLQARTANNRVVNFTGTPDMINQMIDLEITEAYTFSLRGKVVEA

SEQ ID NO: 2387 - protein, 637 aa, Neisseria
MNPSPLLDLIDSPQDLRRLDKKQLPRLAGELRTFLLESVGQTGGHFASNLGAVELTIALHYVYDTPEDKLVWDVGHQSYPHKILTGRKNQMHTMRQYGGLAGFPKRCESEYDAFGVGHSSTSIGAALGMAAADKLLGSDRRSVAIIGDGAMTAGQAFEALNCAGDMDVDLLVVLNDNEMSISPNVGALPKYLASNVVRDMHGLLSTVKAQTGKVLDKIPGAMEFAQKVEHKIKTLAEEAEHAKQSLSLFENFGFRYTGPVDGHNVENLVDVLKDLRSRKGPQLLHVITKKGNGYKLAENDPVKYHAVANLPKESAAQMPSEKEPKPAAKPTYTQVFGKWLCDRAAADSRLVAITPAMREGSGLVEFEQRFPDRYFDVGIAEQHAVTFAGGLACEGMKPVVAIYSTFLQRAYDQLVHDIALQNLPVLFAVDRAGIVGADGPTHAGLYDLSFLRCVPNMIVAAPSDENECRLLLSTCYQADAPAAVRYPRGTGTGAPVSDGMETVEIGKGIIRREGEKTAFIAFGSMVAPALAVAEKLNATVADMRFVKPIDEELIVRLARSHDRIVTLEENAEQGGAGGAVLEVLAKHGICKPVLLLGVADTVTGHGDPKKLLDDLGLSAEAVERRVRAWLSDRDAAN

SEQ ID NO: 2388 - protein, 301 aa, Neisseria
MGLDGLAAYLDAYLENIVREGKSEHTVAAYRRDLQELLALLEEMPSANPSNCTRGDFVQALRRLSGRGLGERTLARKLSSWRQYCVWLVKRGLMHADPTADIKPPKQPERVPKALPQEWLNRMLDLPVDGGDPLAVRDHALFELMYGSGLRVSEIHGLNADDVYLDEAWVHVIGKGRKQRQVPLVGKSVEALKNYLPLRQTASDGKALFTGRNGTRLSQRQIQKRLAQWAAQNGDGRHVSPHMMRHSYAGHLLQASRDIRAVQELLGHSSLSTTQIYTKLDFDHIARLYDEAHPRAKRQDE

SEQ ID NO: 2389 - protein, 354 aa, Neisseria
MALVSMRQLLDHAAENSYGLPAFNVNNLEQMRAIMEAADQVDAPVIVQASAGARKYAGAPFLRHLILAAVEEFPHIPVVMHQDHGASPDVCQRSIQLGFSSVMMDGSLMEDGKTPSSYEYNVNATRTVVNFSHACGVSVEGEIGVLGNLETGEAGEEDGVGAVGKLSHDQMLTSVEDAVCFVKDTGVDALAIAVGTSHGAYKFTRPPTGDVLRIDRIKEIHQALPNTHIVMHGSSSVPQEWLKVINEYGGNIGETYGVPVEEIVEGIKHGVRKVNIDTDLRLASTGAVRRYLAENPSDFDPRKYLSKTIEAMKQICLDRYLAFGCEGQAGKIKPVSLEKMASRYAKGELNQIVK

SEQ ID NO: 2390 - protein, 320 aa, Neisseria
MPSEPPFGRHLIFASLTCLIDAVCKKRYHNQNVYILSILRMTRSKPVNRTAFCCLSLTTALILTACSSGGGGVAADIGAGLADALTAPLDHKDKGLQSLTLDQSVRKNEKLKLAAQGAEKTYGNGDSLNTGKLKNDKVSRFDFIRQIEVDGQLITLESGEFQVYKQSHSALTAFQTEQIQDSEHSGKMVAKRQFRIGDIAGEHTSFDKLPEGGRATYRGTAFGSDDAGGKLTYTIDFAAKQGNGKIEHLKSPELNVDLAAADIKPDGKRHAVISGSVLYNQAEKGSYSLGIFGGKAQEVAGSAEVKTVNGIRHIGLAAKQ

SEQ ID NO: 2391 - protein, 225 aa, Neisseria
MQADFNRPVLAVDTGTSRLSLALRADGETRLFHQEVGSRQSELILPEIRTLFRDAGITAADLGAVVYAQGPGAFTGLRIGIGVAQGLATPFDTPLIGVPSLDAAASLPPPQSCILAATDARMGEVFYAWFDTLNCHRLSDYQVGRAADIRLPEGCAFSDGIGSAFALEEAPPFSGRPDMPTAADFLALAAKGGYPAVHAAHAGLLYVRNKIALTAKEQAERRARP

SEQ ID NO: 2392 - protein, 146 aa, Neisseria
MNIRRAVCADCEELAALDAVCNPSAWTQRQFESALVSPSEQVFLAEKDGGIAAFIVWQNLPDESELHLIATAPECRRQGIASALLEYWFTHLPEDTQRLLLEVRAGNTAAQALYTAHGFSITGRRKNYYRTADGKTEDAVLMEKIC

SEQ ID NO: 2393 - protein, 245 aa, Neisseria
MLSARYLHLHEALGLGPMWLKQAAAVLPPKNTPAPSAQARPQTVRAAPIRPSQPHNGQARLETMKALETAAVPTRKPAPETETPLPGLSDGIAPVPAASGITKLAVVSLCPPIEDAVYGQLFHGKAGILLDNILKAVGLDAAYVHKTCWVKTAAVGNPMPSEQAVANALGQIARELDGCRAPAVLFLGQAFVQPERQTMIETLCGSRPFFIIDHPARLLRQPELKARAWQVLKQLKRALRQGGGS

SEQ ID NO: 2394 - protein, 213 aa, Neisseria
MTDFRQDFLKFSLAQNVLKFGEFTTKAGRRSPYFFNAGLFNDGLSTLQLAKFYAQSIIESGIRFDMLFGPAYKGIILAAATAMMLAEKGVNVPFAYNRKEAKDHGEGGVLVGAPLKGRVLIIDDVISAGTSVRESIKLIEAEGATPAGVAIALDRMEKGTGELSAVQEVEKQYGLPVAPIASLNDLFILLQNNPEFGQFLEPVRAYRRQYGVE

SEQ ID NO: 2395 - protein, 144 aa, Neisseria
MPACFCPHCKTRLWVKETQLNVAQGFVVCQKCEGLFKAKDHLASTKEPIFNDLPEAVSDVKLVHRIGTRAIGKKQISRDEIAGILNGGTTQPDIPPATAATPAAAPQVTVPPAAPARQDGFNWTIATLFALIVLIMQLSYLVIL

SEQ ID NO: 2396 - protein, 436 aa, Neisseria
MSAPDLFVAHFREAVPYIRQMRGKTLVAGIDDRLLEGDTLNKLAADIGLLSQLGIRLVLIHGARHFLDRHAAAQGRTPHYCRGLRVTDETSLEQAQQFAGTVRSRFEAALCGSVSGFARAPSVPLVSGNFLTARPIGVIDGTDMEYAGVIRKTDTAALRFQLDAGNIVWLPPLGHSYSGKTFYLDMLQTAASAAVSLQAEKLVYLTLSDGISRPDGTLAETLSAQEAQSLAEHAGGETRRLISSAVAALEGGVHRVQILNGAADGSLLQELFTRNGIGTSIAKEAFVSIRQAHSGDIPHIAALIRPLEEQGILLHRSREYLENHISEFSILEHDGNLYGCAALKTFAEADCGEIACLAVSPQAQDGGYGERLLAHIIDKARGIGISRLFALSTNTGEWFAERGFQTASEDELPETRRKDYRSNGRNSHILVRRLHR

SEQ ID NO: 2397 - protein, 671 aa, Neisseria
MKSYPDPYRHFENLDSAETQNFAAEANAETRARFLENDKARALSDGILAQLQDTRQIPFCQEHRARMYHFHQDAEYPKGVYRVCTAATYRSGYPEWKILFSVADFDELLGDDVYLGGVSHLVEQPNRALLTLSKLGSDTAYTLEVDLEAGELVEGGFHFPAGKNHVSWRDENSVWVCPAWNERQLTQSGYPREVWLVERGKSFEESLPVYQIGEDGMMVNAWRYLDPQGSPIDLIEASDGFYTKTYLRVSAEGEAKPLNLPNDCDVVGYLAGHLLLTLRKDWNRANQSYPSGALVAVKLNRGELGAAQLLFAPDETQALESVETTKRFVVASLLENVQGRLKAWRFADGKWQEVELPRLPSGALEMTDQPWGGDVVYLAASDFTTPLTLFALDLNVMELTVMRRQPQQFDSDGINVQQFWTTSADGERIPYFHVGKNAAPDMPTLVYAYGGFGIPELPHYLGSIGKYWLEEGNAFVLANIRGGGEFGPRWHQAAQGISKHKSVDDLLAVVRDLSERGISSPEHIGLQGGSNGGLITAAAFVREPQSIGALVCEVPLTDMIRYPLLSAGSSWTDEYGNPQKYEVCKRRLGELSPYHNLSDGIDYPPALITTSLSDDRVHPAHALKFYAKLRETSAQSWLYSPDGGGHTGNGTQRESADELACVLLFLKEFLG

SEQ ID NO: 2398 - protein, 195 aa, Neisseria
MCALHLDFSLEKLRRWHDEGLLDERLFSPQTIGRFALQRLAQNAAALTAAACPLLQRPFESDGFGLLADEAAALELSARLLRFTFRRHDNGYRRRRIDEAADILQHEFARPLTIAEIARRVGLNECYLKRYFKAQTGETVAGCLRRLRLEHALALIESGSTVQAAMHFCGYRHAGRFNEAFRRHYGFLPSDVKKC

SEQ ID NO: 2399 - protein, 103 aa, Neisseria
MNTAAIYRQYQTYVRSDKSGWALDGCSDSALIAQAKQPGLHLEMCINRFDSGITLSRMRGGGTGAFPTEIHNFSHNCALFVMVSGQNRLQMGGREYRPSAGEI

SEQ ID NO: 2400 - protein, 321 aa, Neisseria
MKPRFYWAACAVLLTACSPEPAAEKTVSAASASAATLTVPTARGDAVVPKNPERVAVYDWAALDTLTELGVNVGATTAPVRVDYLQPAFDKAATVGTLFEPDYEALHRYNPQLVITGGPGAEAYEQLAKNATTIDLTVDNGNIRTSGEKQMETLARIFGKEARAAELKAQIDALFAQTREAAKGKGRGLVLSVTGNKVSAFGTQSRLASWIHGDIGLPPVDESLRNEGHGQPVSFEYIKEKNPDWIFIIDRTAAIGQEGPAAVEVLDNALVRGTNAWKRKQIIVMPAANYIVAGGARQLIQAAEQLKAAFKKAEPVAAGKK

SEQ ID NO: 2401 - protein, 107 aa, Neisseria
MQNETINLKQHLAAIKEYWQPEIINRHGFQFHLVKLLGDYGWHTHGYSDKVLFAVEGDMAVDFADGGSMTIREGEMAVVPKSVSHRPRSENGCSLVLIELSDPSEAV

SEQ ID NO: 2402 - protein, 725 aa, Neisseria; identical to SEQ ID NO: 333

SEQ ID NO: 2403 - protein, 96 aa, Neisseria
MRQAFQTAFLKCVYLWCSKRSSESAASAKLKRGINEVKICLNLKGSLHPNPLSRGRGLGRGGQTESLLGRHFQCAGCFYSGLTKIRTRRRSRRQYK

SEQ ID NO: 2404 - protein, 107 aa, Neisseria
MDIVQLGPAELKAWMDEGRMFCLLDVRTDEETAVCSLPNALHIPMNLIPLRQNELPDDVPLVVYCHHGIRSLHTAMYLADAGFENLYNLQGGIDAWAAEIDGNMMRY

SEQ ID NO: 2405 - protein, 218 aa, Neisseria
MDFEKARFNMVEQQIRPWDVLDFDVLDALAEIPRELFVDEDLQGLAYADMALPLANGHKMLEPKVVARLAQGLKLTKNDTVLEIGTGSGYATALLAKLAGRVVSDDIDVEQQNRAKAVLDGLGLDNIDYVQNNGLTELSAGAPFDAVYVGGAVNLVPEVLKEQLKDGGRMVVIVGRKPVQRALLITRRGDVFEEKVLFDTLVAHLDDKDADPFGGFDF

SEQ ID NO: 2406 - protein, 167 aa, Neisseria
MHALHFSASDKAALYREVLPQIESVVADEADWVANLANTAAVLKEAFGWFWVGFYLVDTRSDELVLAPFQGPLACTRIPFGRGVCGQAWAKGETVVVKDVNAHPDHIACSSLSRSEIVVPLFSDGRCIGVLDADSEHLAQFDETDALYLGELAKILEKRFEASRQAV

SEQ ID NO: 2407 - protein, 257 aa, Neisseria
MYRQIGMWDQKWVIGNWKMNGRLQNNNALMHRFRIHPTAERVLIGLAAPTVYLLQLHNAMQIVLNNRILTCAQDVSRFPNNGAYTGEVSAEMLADTGTDIVLIGHSERSLYFGEKNEIQRRKMENVLNVGLIPLLCVGESLEEREAGKEHEVIAHQLSILQGLDTKNIAVAYEPVWAIGTGKVATVEQIADMHAFIYKEILSLCGSDVKIRVLYGGSVKADNAADIFAVPYVDGALVGGASLSYDSFTAIISAAQNA

SEQ ID NO: 2408 - protein, 116 aa, Neisseria
MEAFKTLIWIVNIISALAVIVLVLLQHGKGADAGATFGSGSGSAQGVFGSAGNANFLSRSTAVAATFFFATCMAMVYIHTHTTKHGLDFSNVQQTQQAPKPVSNTEPSAPVPQQQK

SEQ ID NO: 2409 - protein, 30 aa, Neisseria
MAVKPLGYIRGIGRQRNALKTQFEPLKAID

SEQ ID NO: 2410 - protein, 122 aa, Neisseria
MRIFKNQWIVKFAKKHKINDSELLEAVERADNGLIDADLGGGVIKQRIARQGQGRSGGYRSLILFKQADKAFFVYAFAKNDRENISDKELDVYRKAAAYYLKYTRAELAALKEDGIITEIES

SEQ ID NO: 2411 - protein, 103 aa, Neisseria
MKYKNEALAAIHEMMEGAYNIGAIDKKTMRDFDKSCLTEIKPLSGGDIKAIREKEALSQAAFAIYLNVGKNHVSAWERGVKKPSGAALKLLTIVKNKGIEAIA

SEQ ID NO: 2412 - protein, 70 aa, Neisseria
MPDRIKPSRNGGGADDIARQQGTAQTGAKPETSPTARYGDFLRPLQGGIGFKRRGLEGKTGGAQNCLNAV

SEQ ID NO: 2413 - protein, 43 aa, Neisseria
MRDFDKPAEEAAEYAAEGAVKFIEGKPAKKIIAVPGRLENIVV

SEQ ID NO: 2414 - protein, 47 aa, Neisseria
MISNHDTEFTRDIYSSAILKTVEVQRNIAAKGSSSRKKVGELLAIYA

SEQ ID NO: 2415 - protein, 267 aa, Neisseria
MNLFFDTELGKQQNKATHKIRVMSEAWLEKNGYCPCCGSKPMQRFANNKPVADLFCPNCHEQYELKSKNQKTIGNSVPDGAYHTMLERIRSDTNPNFFFLAYKKADYSIRQLVLVPKHFITPDMIIPRNKGIKNRPNHIMCSINLAPLPESGKIFLIDNSRIIEPETVLKKWQSNLFLRNQNAERKGWLLAVMKCIDQLPEEFTLSQMYEFENKLSIQFPQNNHIRDKIRQQLQILRDQNTIEFIGRGLYKKSINCAQLPRYFDFKS

SEQ ID NO: 2416 - protein, 876 aa, Neisseria
MQEQYRPAAIEPAAQKKWDDARIFNVSEDASKPKYYCLSMFPYPSGKLHMGHVRNYTIGDVLSRFKLLNGFNVMQPMGWDAFGMPAENAAMKNNVAPAAWTYDNIEYMKTQLKSLGFAIDWARETATCKPEYYRWEQWLFTKLFEKGIVYRKNGTVNWDPVDQTVLANEQVIDGRGWRSGALIEKREIPMYYFKITDYAEELLNDLDKLEHWPEQVKTMQRNWIGKSRGMTVRFAVSDDSKQGLEGDYAKFLQVYTTRPDTLMGATYVAVAAEHPLAAAAAADKPELQAFIAECKAGSVAEADMATMEKKGVPTGRYVVNPLNGDKLEVWIANYVLWGYGDGAVMAVPAHDERDFEFATKYNLPKKQVIAVGDNAFDENQWQEWYGDKENGVLVNSGDLDGLDFQTAFDAVAAKLQSQGAGEPKTQYRLRDWGISRQRYWGCPIPIVHCEQCGDVPVPADQLPVVLPENVVPDGMGSPLAKMPEFYETACPCCGGAAKRETDTMDTFMESSWYFFRYMSPKFSDGMVDPAAAKYWGAVDQYIGGIEHAILHLLYARFFTKLMRDEGLVNVDEPFERLLTQGMVVCETYYRENDKGGKDWINPADVELTFDDKGRPISAVLKADGLPVVISGTEKMSKSKNNGVDPQELINAYGADTARLFMMFAAPPEQSLEWSDSGVEGAHRFLRRLWRTVYEYLKQGEAVKAFAGSQDGLSKELKDLRHKLHATTAKVSDDYGRRQQFNTAIAAVMELLNQYDKTDTGGEQGRAVAQEVLETAVRLLWPIVPHICETLWSELNGAKLWEAGWPTVDEAALVKSEIEVMVQVNGKLRGKITVAADASKADLEAAALATEGAVKFMEGKPAKKIIVVPGRLVNIVV

SEQ ID NO: 2417 - protein, 171 aa, Neisseria
MKIKQIVKPGLAVLAAGVLSACATKSNVKADGTTDNPVFPKPYSVTLDNKRGTFPTYDELDQMRPGLTKDDIYKILGRPHYDESMYGVREWDYLFHFHTPGVGIDPENTSGVEDVTTCQYKVIFDKDKFARSFYWNPVFPKDAACPPPAPKAEPQVIIREIVPAKPKRIRQ

SEQ ID NO: 2418 - protein, 147 aa, Neisseria
MPFRLFLGILCGLSMVAPVYAQGQPDTVGDFIQKKKVIVDTSKAELCFADDRQCHPVLIGVATPKGTFGLTLNSTDKPGYGGEVIGFKQEGDFLFALHRVWNQIPSERRNERIASPSVSDRIMTNGCINVSDAVYEKLRHYFVLEVI

SEQ ID NO: 2419 - protein, 716 aa, Neisseria
MPSETGADAAKPSDGIACPLRPNNNHLWENLMPEQNRILCRELSLLAFNRRVLAQAEDQNVPLLERLRFLCIVSSNLDEFFEVRMAWLKREHKRCPQRRLDNGKMPSETIADVTEAARSLIRHQYDLFNNVLQPELAQEGIHFYRRRNWTDTQKKWIEDYFDRELLPILTPIGLDPSHPFPRPLNKSLNFAVELDGTDAFGRPSGMAIVQAPRILPRVVPLPSELCGGGHGFVFLSSILHAHVGKLFPGMNVKGCHQFRLTRDSDLTVDEEDLQNLRAAIQNELHDREYGDGVRLEVADTCPAYIRDFLLAQFKLTAAELYQVKGPVNLVRLNAVPDLVNRPDLKFPTHTPGRLKALGKTASIFDLVRQSPILLHHPYQSFDPVVEMMREAAADPAVLAVKMTIYRTGTRSELVRALMKAALAGKQVTVVVELMARFDEANNVNWAKQLEEAGAHVVYGVFGYKVHAKMALVIRREDGVLKRYAHLGTGNYHQGTSRIYTDFGLITADEQITADVNILFMEITGLGKPGRLNKLYQSPFTLHKMVIDRIARETEHAKAGKPARITAKMNSLIEPTVIEALYRASAAGVQIDLIVRGMCTLRPGVKGLSENIRVRSIVGRQLEHARVYYFHNNGTDDTFISSADWMGRNFFRRIETATPITAPELKKRVIHEGLTMALDDNTHAWLMQPDGGYIRAAPAEGESEADLQNDLWTLLGG

SEQ ID NO: 2420 - protein, 367 aa, Neisseria
MLILQAERDSLLKPLQAVTGIVERRHTLPILSNVLIEGKGGQTKLLATDLEIQIDTAGPEGGAGDFRITTNAKKFQDILRALPAGALVSLDWDDSRLTLKAGKSRFALQTLPAADFPMMNVGEDISATFSLEQERFKTMLSQVQYSMAVQDIRYYLNGLLMQVEGSQLRLVATDGHRLAYAACAIDADLPRAEVILPRKTVLELFKLLNNPDDPIQIELLDKQVRFQCNGTTIVSKVIDGKFPDFNRVIPLDNDKIFVLSRAELLGALERASILANEKFRGARLFLQPGLLSVVCSNNEQEEAREEIEIAYQGGELEVGFNIGYLMDVLRNIHSDDMQLAFGDANRSTLFTVPNNPNFKYIVMPMRI

SEQ ID NO: 2421 - protein, 518 aa, Neisseria
MTLAEFWPLCLRRLHDMLPQGQFAQWIAPLTVGEEGGVWVVYGKNQFACNMLKSQFAGKIEAVREELAAGRSAFVFKPGEGVRYEMAAVEGAVEPAEPSLHAVSEGMPVQEVLLDELPSEEPVKPAASKTAADILAERMKNLPHEPRQAAGSASRPESVAVAKARTDVQRDAEEARYEQTNLSPDYTFDTLVEGKGNRLAAAAAQAIAESPGQSYNPFFLYGSTGLGKTHLVQAVGNELLKNRPDAKVRYMHSDDYIRSFMKAVRNNTYDVFKQQYKQYDLLIIDDIQFIKGKDRTMEEFFYLYNHFHNEKKQLILTCDVLPAKIEGMDDRLKSRFSWGLTLELEPPELEMRIAILQKKAEAAGISIEDEAALFIANLIRSNVRELEGAFNRVGASSRFMNRPVIDIDLARTALQDIIAEKHKVITADIIIDAVAKYYRIKISDVLGKKRTRNIARPRQVAMSLTKELTTLSLPSIGDSFGGRDHTTVMHGIRAVAKLREEDPELAQDYEKLLILIQN

SEQ ID NO: 2422 - protein, 44 aa, Neisseria
MKRTYQPSVTKRKRTHGFLVRSKTRGGRAVLAARRAKGRKRLAV

SEQ ID NO: 2423 - protein, 121 aa, Neisseria
MDYRFGRQYRLLKTDDFSSVFAFRNRRSRDLLQVSRSNGNGLGHPRIGLVVGKKTAKRANERNYMKRVIRDWFRLNKNRLPPQDFVVRVHRKFDRATAKQARAELAQLMFGNPATGCRKQA

SEQ ID NO: 2424 - protein, 73 aa, Neisseria
MNFLLSKLLLGLIRFYQYCISPLIPPRCRYTPTCSQYAVEAVKKYGAFKGGRLAIKRIARCHPFGGHGHDPVP

SEQ ID NO: 2425 - protein, 545 aa, Neisseria; identical to SEQ ID NO: 26

SEQ ID NO: 2426 - protein, 241 aa, Neisseria
MSEGMMSPVLYLIPTPLGTPDTPCLLPHEQQAIVGLTDFVVEAEKTARAHLKHLGVTTPIRELNLQTLNEHTDLKTLPELLKPLQEGRSMGIVSEAGCPAVADPGANLVALAHKHGFEVRPLVGPSSLLLALMASGANGQSFAFKGYLPSEKNERIQAFRALEQRSRQCGETQIFIETPYRNDALLADAVENLHPETRLCTATDLTLPTQEIISQTIVQWRKRKEMPNLKKRPTIFVMYAG

SEQ ID NO: 2427 - protein, 196 aa, Neisseria
MGLELPLILGTSSVFRREQMERLGIAFQAASPDFDETPMLGESAPQTALRLAEGKARSLTGRFPEALIVGADQVAWCDGRQWGKPMNLANAQKMLMHLSGREIEFYSAIVLLNTVTGRMRRHIDKTVVVMRQLDELHILRYLEREPDAVYCSCALKSEDLGALLIERIESTDPNALIGLPVFRLVDFLKNEGVEVL

SEQ ID NO: 2428 - protein, 167 aa, Neisseria
MSDPNLIDLEIFAAEGQNLQGSFLLEELDERVSSHDYPADRQTKISFTLTGGRDRLQRLFLDLNVKADMPLICQRCIKPMPFMLDESSRIVLFSNEESLDESMLADEELEGILIEKELDVRTLVEDQILMSLPFSPRHEDCGDNGTLEEVNRDKPNPFAVLAGLKSN

SEQ ID NO: 2429 - protein, 59 aa, Neisseria
MAVQQNKKSPSKRGMHRSHDALTAPALSVDSTTGEVHRPHHISPNGMYRGRKVVKAKGE

SEQ ID NO: 2430 - protein, 175 aa, Neisseria
MKQKIWYTYDDIHRVIKALAEKIRNADIKYDAMIAIGGGGFIPARMLRCFLEIPIYAVTTAYYDSDNEGQVTEEVKKVQWLDPVPEALRGKNVLVVDEVDDSRVTMEFCLKELLKEDFGTIGVAVLHEKIKAKAGKIPEGIPYFSGITVEDWWINYPWDALDIDEHNRLAEAGRG

SEQ ID NO: 2431 - protein, 351 aa, Neisseria
MITLAVDAMGGDQGLAVTVPGATAFLQAHPDVRLIMTGDETQLRQALTAAGAPMERIDICHTTQVVGMDEAPQSALKNKKDSSMRVAINQVKEGKAQAAVSAGNTGALMATARFVLKTIPGIERPAIAKFLPSDTDHVTLALDLGANVDCTSEQLAQFAVIGSELVHALHPQKGQPRVGLVNVGTEDIKGTDTVKQTYKLLQNSKLNFIGNIESNGILYGEADVVVADGFVGNVMLKTIEGAVKFMSGAIRREFQSNLFNKLAAVAALPALKGLKNKLDPRKFNGAILLGLRGIVIKSHGGTDETGFRYALEEAYHEAKSAGLSKIEQGVAEQLAALETAKAVQNENVGGL

SEQ ID NO: 2432 - protein, 83 aa, Neisseria
MKTLEKRMKALDKRIMKFGKSLEGRLDARLIESALDYIHYSERFLAFEILCTYIEDFDVRLTEQESREISFINKEFEIESTSD

SEQ ID NO: 2433 - protein, 129 aa, Neisseria
MKTSTVVFGGFFMADNGERIQIPVLENPDIREINHFFSVSNFEKKTGVLVFRIIPEPEFGNTELTVYFKKGYYSGLTKTSTALPRLAVLVFVNPLYQTKTNTRANSLTATRQSKCRLKQLGLSDGISFA

SEQ ID NO: 2434 - protein, 320 aa, Neisseria
MQYAKISGTGSYLPANRVSNDDLAQKVDTSDEWITARTGIKFRHIAAENEKTSDLAAEAAHRALDAAGLDSGEIDLIIVATATPDMQFPSTATIVQQKLGITNGCPAFDVQAVCAGFMYALTTANAYIKSGMAKNALVIGAETFSRIVDWNDRTTCVLFGDGAGAVVLSASDTPGIIHSKLKADGNYLKLLNVPGQIACGKVSGSPYISMDGPGVFKFAVKMLSKIADDVIEEAGYTAAQIDWIVPHQANRRIIESTAKHLGLSMDKVVLTVQDHGNTSAASIPLALDTGIRSGQIKRGQNLLLEGIGGGFAWGAVLLQY

SEQ ID NO: 2435 - protein, 135 aa, Neisseria
MKRQAFFKLMACAAFLSAVSLRLPVLGACYAILSLYAFALYGIDKRCAIRGQRRIPEHRLLLPALLGGWVGAYFGSMTFKHKTAKKRFVVLFRLTVSGNVLATLILIYSGLNLNQYGVASPCRTICTVCGFVALS

SEQ ID NO: 2436 - protein, 308 aa, Neisseria
MSFAFFFPGQGSQSLGMMNGFAEHAIVKNTFAEASAILGQDLWAMINGSDAEIIGQTVNTQPIMLAAGVAVYRAYLEAGGKTPAAVAGHSLGEYTALVAAGALNFADAVKLVRLRAELMQSAVPQGVGAMAAILGLEDEQVKAICAEAAQSEVVEAVNFNSPGQIVIAGNAAAVGRAMAAAKEAGAKRALPLPVSVPSHCSLMKPAADKLAEALKTVEIKQPQIRVIHNADVAAYDDADKIKDALVRQLYSPVRWTETVNALVSDGIAESAECGPGKVLAGLAKRINKAAACSALTDAGQVAAFIEAH

SEQ ID NO: 2437 - protein, 621 aa, Neisseria
MIEKLTFGLFKKEDARSFMRLMAYVRPYKIRIVAALIAIFGVAATESYLAAFIAPLINHGFSAPAAPPELSAAAGIISTLQNWREQFTYMVWGTENKIWTVPLFLIILVVIRGICRFTSTYLMTWVSVMTISKIRKDMFAKMLTLSSRYHQETPSGTVLMNMLNLTEQSVSNASDIFTVLTRDTMIVTGLTIVLLYLNWQLSLIVVLMFPLLSLLSRYYRDRLKHVISDSQKSIGTMNNVIAETHQGHRVVKLFNGQAQAANRFDAVNRTIVRLSKKITQATAAHSPFSELIASIALAVVIFIALWQSQNGYTTIGEFMAFIVAMLQMYAPIKSLANISIPMQTMFLAADGVCAFLDTPPEQDKGTLAPQRVEGRISFRNVDVEYRSDGIKALDNFNLDIRQGERVALVGRSGSGKSTVVNLLPRFVEPSAGNICIDGIDIADIKLDCLRAQFALVSQDVFLFDDTLFENVRYSRPDAGEAEVLFALQTANLQSLIDSSPLGLHQPIGSNGSNLSGGQRQRVAIARAILKDAPILLLDEATSALDNESERLVQQALERLMENRTGIIVAHRLTTIEGADRIIVMDDGKIIEQGTHEQLMSQNGYYTMLRNISNKDAAVRTA

SEQ ID NO: 2438 - protein, 521 aa, Neisseria
MTQDKILILDFGSQVTQLIARRVREAHVYCELHSFDMPLDEIKAFNPKGIILSGGPNSVYESDYQADTGIFDLGIPVLGICYGMQFMAHHLGGEVQPGNQREFGYAQVKTIDSELTRGIQDGEPNTLDVWMSHGDKVSKLPDGFAVIGNTPSCPIAMMENAEKQFYGIQFHPEVTHTKQGRALLNRFVLDICGAQPGWTMPNYIEEAVAKIREQVGSDEVILGLSGGVDSSVAAALIHRAIGDQLTCVFVDHGLLRLNESKMVMDMFARNLGVKVIHVDAEGQFMAKLAGVTDPEKKRKIIGAEFIEVFDAEEKKLTNAKWLAQGTIYPDVIESAGAKTKKAHAIKSHHNVGGLPENMKLKLLEPLRDLFKDEVRELGVALGLPREMVYRHPFPGPGLGVRILGEVKKEYADLLRQADDIFIQELRNTTDENGTSWYDLTSQAFAVFLPVKSVGVMGDGRTYDYVIALRAVITSDFMTAHWAELPYSLLGKVSNRIINEVKGINRVVYDVSGKPPATIEWE

SEQ ID NO: 2439 - protein, 248 aa, Neisseria
MSTQDLNGKIALVTGASRGIGAAIADTLAAAGAKVIGTATSESGAAAISERLAQWGGEGRVLNSAEPETIESLIADIEKAFGKLDILVNNAGITRDNLLMRMKEEEWDDIMQVNLKSVFRASKAVLRGMMKQRSGRIINITSVVGVMGNAGQTNYAAAKAGLIGFSKSMAREVGSRGITVNCVAPGFIDTDMTRALPEETRQTFTAQTALGRFGDAQDIADAVLFLASDQAKYITGQTLHVNGGMLMP

SEQ ID NO: 2440 - protein, 52 aa, Neisseria
MVEQSFGTLHHKFRYARAAYFGLIKVSAQSHLKAMCLNLLKAANRLSAPAAA

SEQ ID NO: 2441 - protein, 127 aa, Neisseria
MYCLRLRRLVLIFVNPLYIIATTVPAQQAFLDAAELMQWSIETEGLGLNVISHKILGKDHAQVEFEAYFRDGQHRSAHHELSGFVNIGGQWYFIDPTVPHPAMKQPCICGSGKKFKACCGKYLKPVA

SEQ ID NO: 2442 - protein, 231 aa, Neisseria
MLSEADIAAQTAFAAALPLLIDSPMLGEEMSRQEQSALWEQYSGEKGLWIVDPIDGTNNFVNGLPHFAVSVAFVRNGRAELGVIYNPVSGECFYAERGQGAFLNGTRLPLRLVDKKLNEAIAGVEIKYLRSGKLSSRMSTLAPFGTIRSMGSSTLDWCYLACGRYDVYVHGGQKLWDYAAGALIFEEAGGRLTTLEGDGFWSGEHVFKRSVVAALEPKLFERWVGWIRENQ

SEQ ID NO: 2443 - protein, 241 aa, Neisseria
MPRFHLPENLSVGQTVALPDNIVRHLNVLRVRPNENITLFDGKGKAHAARLTVLEKRRAEAEILHEDTTDNESPLNITLIQSISSGDRMDFTLQKSVELGVTAIQPVISERCIVRLDGERAAKRLARWQEIVISACEQSGRNTVPPVLPIIGYREALDKMPSESTKLIMSINRARKLGDIRQPSGAIVFMVGPEGGWTEQEEQQAFEAGFQAVTLGKRILRTETAPLAALAAMQTLWGDFA

SEQ ID NO: 2444 - protein, 280 aa, Neisseria
MQNHVISLASAAERRAHIAATFGVRGIPFQFFDALMPSEELNRMMAELVPGLAKQHLLSEVEKACFMSHAVLWKQALDEGLPYVAVFEDDVLLGKDAEKFLAEDTWLEERFDKDSAFIVRLETMFAKVIVRPDKVLNYENRSFPLLESEHWGTAGYIISREAMRFFLERFAVLPAEWIKAVDWMMFTYFFDKEGMPVYQVNPALCTQELHYAKFLSKNSMLGSDLEKDREQERRHRRSLKVMFDLKRALGKFGREKKKRMERQRQAELEKAYGRRVISFK

SEQ ID NO: 2445 - protein, 31 aa, Neisseria
MDIVFAADGRMRRLFTLRQYFGILRRLLKNR

SEQ ID NO: 2446 - protein, 275 aa, Neisseria
MQNHVISLASAAERRAHIADTFGRHGIPFQFFDALMPSERLEQAMAELVPGLSAHPYLSGVEKACFMSHAVLWKQALDEGLPYITVFEDDVLLGEGAEKFLAEDAWLQERFDPDTAFIVRLETMFMHVLTSPSGVADYCGRAFPLLESEHWGTAGYIISRKAMRFFLDRFAALPPEGLHPVDLMMFSDFFDREGMPVCQLNPALCAQELHYAKFHDQNSALGSLIEHDRLLNRKQQRRDSPANTFKHRLIRALTKISREREKRRQRREQFIVPFQ

SEQ ID NO: 2447 - protein, 349 aa, Neisseria
MPSEAFRRHRAYRENKLQPLVSVLICAYNVEKYFAQSLAAVVNQTWRNLDILIVDDGSTDGTLAIAQRFQEQDGRIRILAQPRNSGLIPSLNIGLDELAKSGGGGEYIARTDADDIAAPDWIEKIVGEMEKDRSIIAMGAWLEVLSEEKDGNRLARHHEHGKIWKKPTRHEDIADFFPFGNPIHNNTMIMRRSVIDGGLRYNTERDWAEDYQFWYDVSKLGRLAYYPEALVKYRLHANQVSSKYSIRQHEIAQGIQKTARNDFLQSMGFKTRFDSLEYRQIKAVAYELLEKHLPEEDFERARRFLYQCFKRTDTLPAGAWLDFAADGRMRRLFTLRQYFGILHRLLKNR

SEQ ID NO: 2448 - protein, 687 aa, Neisseria
MMTQTLLIELLTEELPPKALNNLGNHFAASVAEGLEKAQLVDGAAEFTAYASPRRLAVQVKNVKAVQADQKIVKKGPAVANAMKDGAPTKALEGFARGAGAKIEDLTIVHDGKQDVYAYEYVQIGKPLGGLLEDIINQAVKKLPIPKVMRWGSSTFTFVRPVHGLVVLHGGDIVNVSVLGLQSGNKTLGHRFLSDGEITIENADSYAAQMREQGKVVASFAERKAAIQTVLEGQARRLNATAAADEALLDEVTALVEWPVVLEAGFEEHFLAVPQECLILTMQQNQKYFPLLDQNGKLMNRFLLVSNLQTEDPSHIIQGNERVLRARLSDAEFFYKQDQKATLESRLPKLTNVVYHNKIGSQAERIERLQSIAAHIAKALGADAAAAERAARLAKADLVTEMVGEFPELQGTMGKYYARLDGETEEITEAVEQHYQPRFAGDNLPEGKIAAAVALADKLETLVGIWGIGLIPTGDKDPYALRRAALGILRMLMQYGLDVNELIQTAFNSFPQGLLNEKTPSETADFMQARLAVLLQNDYPQDIVAAVLAKQPRRLDDLTAKLQAVAAFKQLPEAAALAAANKRVQNLLKKADAELGAVNESLLQQDEEKALFAAAQGLQPKIAAAVAEGNFQTALSELASVKPQVDAFFDGVMVMAEDAAVKQNRLNLLNRLAEQMNAVADIALLGE

SEQ ID NO: 2449 - protein, 115 aa, Neisseria
MPVYFRTPSRKRLHKMNRRQHKKLHLGEFQTLIFGVQGSLHQAEDDAEAFDRFMDELIAYLAANGFEMAGGRLRRFFVPVSKIRCPKLGRNREKSHYLLAGRPRRCCHFVRHPAG

SEQ ID NO: 2450 - protein, 301 aa, Neisseria
MLTFQQIIFKLQTFWADKGCTVIQPFDMEVGAGTSHPATCLRALGPEPWFAAYVQPSRRPKDGRYGDNPNRLQHYYQFQVALKPAPANIQDLYLDSLRELGIDPKVHDIRFVEDDWENPTLGAWGLGWEVWLNGMEVTQFTYFQQVGGIDCTPVLGEITYGIERLAMYLQGVENVYDLVWAKTLDGNTVTYGDVYHQNEVEQSTYNFEYSDADWLLRQFNDYEAQAKRLLAEENAALALPAYELVLKAGHTFNLLDARGAISVTERATYIGRIRALSRAVAQKYVESREKLGFPLMKANAA

SEQ ID NO: 2451 - protein, 140 aa, Neisseria
MSIMQVEVVSSEQKIYSGEATFIVVPTVQGELGIYPRHEPIMSLVRPGALRLTVPGEDKEVLVAVSGGVLEVQPDKVTVLADVAVRSAEMDRARAEEAKKAAEAGISQAKDDKALAEAHKVLAAAIAQLKTLDYIRSHKK

SEQ ID NO: 2452 - protein, 465 aa, Neisseria
MSQGKIVQIIGAVVDVEFPRDMIPRVYDALKLDENGLTLEVQQLLGDGVVRAIAMGSSDGLKRGMTVSNTGAPITVPVGKGTLGRIVDVLGTPVDEAGPIDTDKSRAIHQAAPKFDELSSTTELLETGIKVIDLLCPFAKGGKVGLFGGAGVGKTVNMMELINNIAKAHSGLSVFAGVGERTREGNDFYHEMKDSNVLDKVAMVYGQMNEPPGNRLRVALTGLTMAEYFRDEKDENGKGRDVLFFVDNIYRYTLAGTEVSALLGRMPSAVGYQPTLAEEMGRLQERITSTQTGSITSIQAVYVPADDLTDPSPATTFAHLDATVVLSRDIASLGIYPAVDPLDSTSRQLDPMVLGQEHYDVARGVQSTLQKYKELRDIIAILGMDELSDEDKLTVMRARKIQRFLSQPFHVAEVFTGSPGKYVALRDTIAGFKAILNGEYDHLPEQAFYMVGSIEEAVEKAKTLN

SEQ ID NO: 2453 - protein, 291 aa, Neisseria
MAVGKEILTKIRSVQNTQKITKAMQMVSTSKMRKTQERMRLARPYAEKVRMVMSHLAQTNTDHGIPLLESHREIRRVGFILITSDKGLCGGLNANVLKKFLAQVQEYRNQGIEEEIVCFGSKGLMACQSIGLNVVASAVNLGDTPKMEMLLGPLTELFQRYEKHEIDRIHLVYSGFVNTMRQEPRMEVLLPIGENVIGDSAPKSPFSWEYRYEPTALAVLEYLVRRYLESVVYQALSDNMASEQAARMVAMKAATDNAGNAIKELRLVYNKSRQAAITTELSEIVAGAAAV

SEQ ID NO: 2454 - protein, 515 aa, Neisseria
MQLNPAEISDLIKAKIENLSVNAEVRTCGTVISVTDGIVRIHGLSDAMQGEMLEFPGNTFGLAMNLERDSVGAVVLGEYEHIKEGDTVTCTGRILEVPVGRELVGRVVDALGRPIDGKGPINTTLTAPIEKIAPGVIARKSVDQPMQTGLKAIDSMVPVGRGQRELIIGDRQTGKTAVALDAIVNQKGTGVICIYVAIGQKASSIANVVRKLEEHGAMEHTIVVAATASEAAALQYIAPYSGCTMGEFFRDRGEDALIVYDDLSKQAVAYRQISLLLRRPPGREAYPGDVFYLHSRLLERAARVNEHEVEKLTNGEVKGKTGSLTALPIIETQAGDVSAFVPTNVISITDGQIFLETDLFNAGIRPAINAGISVSRVGGAAQTKVIKKLGGGIRLALAQYRELAAFSQFASDLDEATRKQLEHGEVVTELMKQKQFSTLNTAEMALTLWAINNGSYSDVPVAKALAFESEFLSFVRTQHPEVLEAVNASGAMSDESEKTLEAAMKSFKSSYAYQA

SEQ ID NO: 2455 - protein, 177 aa, Neisseria
MAEFATIARPYAKALFGLAQEKNQIESWLGGLEKLAAVVQEGKVASLIDRPETNASEKADILIDLVGLKDKELKNFVIVLAGQKRLSILPEVYAQYQDLTLSFNHIKSAVIYSAYPLTDKQVGELVQMLNKRFDSELKISVEIEPELIGGIKVEVGDQVLDLSVQGKLSALYTTMTN

SEQ ID NO: 2456 - protein, 156 aa, Neisseria
MNINATLFAQIIVFFGLVWFTMKFVWPPIAKALDERAAKVAEGLAAAERGKSDFEQAEKKVAELLAEGRNQVSEMVANAEKRAAKIVEEAKEQASSEAARIAAQAKADVEQELFRARESLREQVAVLAVKGAESILRSEVDASKHAKLLDTLKQEL

SEQ ID NO: 2457 - protein, 78 aa, Neisseria
MGLIAIACGLIVALGALGASIGIAMVGSKYLESSARQPELIGPLQTKLFLIAGLIDAAFLIGVAIALLFAFVNPFAGA

SEQ ID NO: 2458 - protein, 288 aa, Neisseria
MAGETITAADYIKHHLQSLTSLSDVTQGQGLKNIADFSFINLDAVFFAVLLGVIGSFLLWRGAKKATAGVPGRFQAAVEILFEFVDDMCKSIIHNEKSRKAVAPLGLTLFVWIFLMNAMDMLPVDLLPMVWQGITGNHHALLRVVPTADLNTTLALAVGVLLICIYYNIKIKGLGGWFHELFSAPFGAKLAPANFLLNLVEFLSKTVSHGMRLFGNMYAGELVFLLIALLGGAWAASGSVEVMDPILFVFHIIAGLAWAIFHILVITLQAFIFMALAFVYIGQAHDAH

SEQ ID NO: 2459 - protein, 117 aa, Neisseria
MKQIIILQSAVLSICAAVAFAVWGFAGFLSAVGGGLSYLLPTFVAVLLLKLFRGNPFLQSRMFVFGEILKVVLSLLSMLAVFAIWHQSLVFAPFLMGLLGVSHLVFLVLLRVKDYGR

SEQ ID NO: 2460 - protein, 97 aa, Neisseria
MQFVWEAERTKAKVNAMLCLKRQAVANPLFGKGRLKIFSDDLLFIEQIPQTADNPTDKLLQFRVDFLLFPRKANKSRKNIKNVKKLRTNSLISCNYM

SEQ ID NO: 2461 - protein, 57 aa, Neisseria
MGNIILLTFFLLHVRIVFLFSFLIFEEIMNTRIIVSAAFVALALAGCGSINNVTVSD

SEQ ID NO: 2462 - protein, 286 aa, Neisseria
MAKVKGGLGRGLDSLLANGADNSSGDRLTTVAVKDIRPGRYQARVQIDDEALQELADSIKAQGVIQPVIVREHGLSRYELIAGERRWRAAQIAGLTEIPAVIKTISDETALAMGLIENLQRENLNPIEEAQGLKRLADEFGLTHETIAQAVGKSRSAISNSLRLLSLPEPVQEMLYQRRLEMGHARALLTLPVVEQLELAQKAVKNGWSVREVERRSQAALQNKRPEPKKTAAADIGRLNDLLTEKLGVNAEVKTANHKKGRIVLYFDTPETFGHLLEQLGIDYRP

SEQ ID NO: 2463 - protein, 190 aa, Neisseria
MMVRRLIIGISGASGFQYGVKALELLRAQDVETHLVVSKGAEMARASETAYARDEVYALADFVHPIGNIGACIASGTFKTDGMLVAPCSMRTLASVAHGFGDNLLTRAADVVLKERRRLVLMVRETPLNLAHLDNMKRVTEMGGVVFPPVPAMYRKPQTADDIVAHSVAHALSLFGIDTPDSAEWQGMAD

SEQ ID NO: 2464 - protein, 287 aa, Neisseria; identical to SEQ ID NO: 109

SEQ ID NO: 2465 - protein, 228 aa, Neisseria
MADLTFQQAVSTIVGMKDEIFRALGETFVMVGLSTTFAVIFGTLLGVLLFVTSSRQLHYNKLVNFLLDNLVNLMRAFPFVILMIAMIPATRAIVGSTIGPVAASLVLSVSGLFYFARLVEQNLREVPKGVIEAAAAMGAPPIAIVCKVLLNEARAGMVSSITVLAIGLLSYSAAAGMIGGGGLGDLAIRYGYYRYQTEVIIFIVALLVLLVILIQSTGNALARKLDKR

SEQ ID NO: 2466 - protein, 245 aa, Neisseria
MIILDKVSKHYQTRDKTRFAAVEPTSLEIRDGEIFGLMGYSGAGKSTLLRLINLLERPDSGKVNVCGQELTALDAAALRQARQNIGMVFQQFNLLSNRTVADNVAFPLEIAGWPSEKIKARVKECLEIVGLTERAGHYPAQLSGGQKQRVGIARALAPKPQVILADEPTSALDPATTRSVLECLEDINKRFNVTIVIVTHEMSVIRRLCDRAALLDKGKVVEIVEVRGNQIHAQSDIGRELIRED

SEQ ID NO: 2467 - protein, 616 aa, Neisseria
MYLPSMKHSLPLLAALVLAACSSTNTLPAGKTPADNIETADLSASVPTRPAEPERKTLADYGGYPSALDAVKQKNDAAVAAYLENAGDSAMAENVRNEWLKSLGARRQWTLFAQEYAKLEPAGRAQEVECYADSSRNDYTRAAELVKNTGKLPSGCTKLLEQAAASGLLDGNDAWRRVRGLLAGRQTTDARNLAAALGSPFDGGTQGSREYALLNVIGKEARKSPNAAALLSEMESGLSLEQRSFAWGVLGHYQSQNLNVPAALDYYGKVADRRQLTDDQIEWYARAALRARRWDELASVISHMPEKLQKSPTWLYWLARSRAATGNTQEAEKLYKQAAATGRNFYAVLAGEELGRKIDTRNNVPDAGKNSVRRMAEDGAVKRALVLFQNSQSAGDAKMRRQAQAEWRFATRGFDEDKLLTAAQTAFDHGFYDMAVNSAERTDRKLNYTLRYISPFKDTVIRHAQNVNVDPAWVYGLIRQESRFVIGAQSRVGAQGLMQVMPATAREIAGKIGMDAAQLYTADGNIRMGTWYMADTKRRLQNNEVLATAGYNAGPGRARRWQADTPLEGAVYAETIPFSETRDYVKKVMANAAYYAALFGAPHIPLKQRMGIVPAR

SEQ ID NO: 2468 - protein, 70 aa, Neisseria
MPAIRVKENEPFEVAMRRFKRAVEKTGLLTELRAREAYEKPTTERKRKKAAAVKRLQKRLRSQQLPPKMY

SEQ ID NO: 2469 - protein, 180 aa, Neisseria
MRTHRKTCSAVCFAFQTASKPAVSIRHPSEDIMSLKIRLTEDMKTAMRAKDQVSLGTIRLINAAVKQFEVDERTEADDAKITAILTKMVKQRKDSAKIYTEAGRQDLADKENAEIEVLHRYLPQMLSAGEIRTEVEAAVAETGAAGMADMGKVMGLLKTRLAGKADMGEVNKILKAVLTA

SEQ ID NO: 2470 - protein, 130 aa, Neisseria
MPTSTKPYILRALCEWCSDNSLTPHILVWVNEHTRVPMQYVRDNEIMLNIGATATQNLQIDNDWISFSARFGGQAHDIWIPVGHVLSLFARETGEGMGFELEAYRPDTPPENTSAETAPRPAKKGLKLVK

SEQ ID NO: 2471 - protein, 201 aa, Neisseria
MMTLYSGITCPFSHRCRFVLYEKGMDFEIKDVDIYNKPEDLAVMNPYNQVPVLVERDLVLHESNIINEYIDERFPHPQLMPGDPVMRGRGRLVLYRMEKELFNHVQVLENPAATNKEQAKAREAIGNGLTMLAPSFSKSKYILGEDFSMIDVALAPLLWRLDHYDVKLGKSAAPLLKYAERIFQREAFIEALTPAEKAMRK

SEQ ID NO: 2472 - protein, 553 aa, Neisseria; identical to SEQ ID NO: 298

SEQ ID NO: 2473 - protein, 208 aa, Neisseria
MRCFMIQNVVTSIILYSGTAVDLLIILMLFFAKRKSRKDIINIYLGQFLGSVSLILLSLLFAFVLDYIPSKEILGLLGLIPILLGIKVLLLGDSDGEAIAKEGLRKDNKNLIFLVAMITFASCGADNIGVFVPYFTTLNLANLIVALLTFLVMIYLLVFSAQKLAQVPSVGETLEKYSRWFVAVVYLGLGIYILVENNSFDMLWTVLG

SEQ ID NO: 2474 - protein, 71 aa, Neisseria
MKQGIHPNYHEVNVTCSCGNKFATKSAMEKENFNIEVCSLCHPFYTGTQKIVDTTGRVDKFNNKFGNLFKR

SEQ ID NO: 2475 - protein, 127 aa, Neisseria
MMGSKFFFLLLRFAGSGLPPSHMRGIGIVGRRVRGFLARRVSPHIGRGVNIERGAYVFPDTVLGDGSGIGANCEICRGLVVGKNVMMEPECLFYSNNHKFDRSKNALRATRKSVRLRWRTMSGRGTG

SEQ ID NO: 2476 - protein, 166 aa, Neisseria
MKKILTAAVVALIGILLAIVLIPDSKTAPAFSLPDLHGKTVSNADLQGKVTLINFWFPSCPGCVSEMPKIIKTANDYKNKNFQVLAVAQPIDPIESVRQYVKDYGLPFTVMYDADKAVGQAFGTQVYPTSVLIGKKGEILKTYVGEPDFGKLYQEIDTAWRNSDAV

SEQ ID NO: 2477 - protein, 127 aa, Neisseria
MKLTVRNYHLDGYGHVNNARYLEFFEEARWAFFEERGLLHELAGLILIVARIDIRYSRPAVEGDVLQFSCRLKTPGTRRIVLTQTITLPNGKTAAEADITLMPVHAATQRTVSLPATLARALEALSE

SEQ ID NO: 2478 - protein, 160 aa, Neisseria
MPSENPCSDGIPFCRNGQSETTDWAIISFLRIPRDSKGKTMYEVNRSVFVLIPLEPFWNWLQTLPGNHLDGLTLEDIQADANSYLVRPCETADEVWDEIEARFEDIFAAELADWCEDEREWPALDADIFNEWFDIQLSTVITDLEHEPLAREAFQPINLN

SEQ ID NO: 2479 - protein, 275 aa, Neisseria
MKKTAYAFLLLIGFASAPAFAETRPADPYEGYNRAVFKFNDQADRYIFAPAARGYRKVAPKPVRAGVSNFFNNLCDVVSFGSNILRLDIKRASEDLVRVGINTTFGLGGLIDIAGAGGIPDNKNTLGDTFASWGWKNSNYFVLPVLGPSTVRDALGTGITSVYSPKNIVFRTPVGRWGTTAVSAVSTREGLLDLTDSLDEAAIDKYSYTRDLYMKVRARQTGATPAEGTEDNIDIDELVESAETGAAETAVQEDSVSETQAEAAGEAETQPGTQP

SEQ ID NO: 2480 - protein, 92 aa, Neisseria
MHTELKNGILHIGGDITVKTLTAAAFTRFRQQCRLKDTCAVDLSGVGRADSACVSLLLEVLRGCKGSVRLTGIPESVRALSELYEIKDWLKS

SEQ ID NO: 2481 - protein, 196 aa, Neisseria; identical to SEQ ID NO: 174

SEQ ID NO: 2482 - protein, 164 aa, Neisseria; identical to SEQ ID NO: 532

SEQ ID NO: 2483 - protein, 258 aa, Neisseria
MNFIRSVGAKTLGLIQSLGSITLFLLNILAKSGTAFVRPRLSVRQVYFAGVLSVLIVAVSGLFVGMVLGLQGYTQLSKFKSADILGYMVAASLLRELGPVLAAILFASSAGGAMTSEIGLMKTTEQLEAMNVMAVNPVARVVAPRFWAGVFSMPLLASIFNVAGIFGAYLVGVTWLGLDSGIFWSQMQNNITIHYDVINGLIKSAAFGVAVTLIAVHQGFHCVPTSEGILRASTRTVVSSALTILAVDFILTAWMFTD

SEQ ID NO: 2484 - protein, 266 aa, Neisseria
MSPSPFIEMKDVAFAYGDRPILKNINFSIPQGNFAAVMGGSGSGKTTLMRLITGQIRPQSGQVLIEGRDLAGFSADELYEHRRRMGVLFQHGALFTDLSVFDNIAFPMRELTRLPEAVIRDLVLLKLNAVGLRGVENLMPSELSGGMSRRVALARTIALDPEIMLYDEPFTGLDPISLGVIAHLISRVNKALRSTSIMVTHDIEKSLEIVDQVIFLAHGEIMFSGSPQEMRELDSPWVRQFVGGLADGPVAYRYPAQTSLQQDLLG

SEQ ID NO: 2485 - protein, 305 aa, Neisseria
MEKAEHLNSSRFVNLVKSGGGSYVEGSYRFDTLSNGISIHGGTVTARCDFCSSRLAEPYVSFVLLLEGSLDFGINRCRFQIDADGGKIVLIAVGEEVLFSRYLYRGGKTVKMTIKGMEQWLLRPEYARFAPLLYREPVRIWDLPPNLRGLAASCLKAVPKGHLGETLRREADVLRLLSDLWDTVSDGIGPAAGQTAEADAMPSEDFSRTLNAAFADGAHQVNRLTDALNISERTLQRRMRDHFGITASEWLHHKQMQHALYLLQNGGKSIGETAYLCGYRHVSSFTQAFRQYFGSTPAETKKENR

SEQ ID NO: 2486 - protein, 480 aa, Neisseria
MKQLAMYINGRFENDFNGEWRDVLNPSTEEAIAREPKGGKADVDRAVAAARAAQPAWERLPAVERGAYLRKIAQGIRERADELTDTIVAEGGKTKDLARVEVMFTADYLDYQAEWARRYEGEIIQSDRPRENILLFKRPLGVIAGILPWNFPFFLIARKMGPALVTGNTIVVKPSSVTPINCHIFAEIVDAVGLPAGVFNVVNGPGAEIGNALSAHPQVDMVSLTGSVEAGRQVMEAASANITKVSLELGGKAPAIVLKDADLDLAVKSILASRVGNTGQICNCAERVYVHSSLKDAFIEKMTAAMKGVRYGNPAEAEAGALEMGPLIEERAVKAVAEKVERAVKQGAKLVCGGKRAEGRGYFFEPTLLTDTDNSMDIMKEETFGPVLPVSAFDTLDQVIALANDCEFGLTSSVYTTNLNEAFYVTRRLQFGETYINRENFEAMQGFHAGWKKSGIGGADGKHGLEEYLQTQVVYLETDI

SEQ ID NO: 2487 - protein, 1082 aa, Neisseria; identical to SEQ ID NO: 500

SEQ ID NO: 2488 - protein, 593 aa, Neisseria
MPYFALFDDAVSGRAKRYQNHVESRFFRPEELDALDGALQSGWQKGLHSVLFADYGFGLPLTGVESERGGNLALHWFANCADIDAESWLARHSDGLPAGISTPQPSVSETDYLDRIRQIHEAIRRGDTYQINYTTRLHLQAYGNPVSLYRRLRQPVPYAVLSHLPDAEGQSAWTLCFSPELFLKIGSDGTISTEPMKGTAPILGDGQDERRAAELQADPKNRAENVMIVDLLRNDLGKIAQTGTVCVPEPFKVSRFGSVWQMTSTIQAQALPHTSFADILRAAFPCGSITGAPKKMSMQIIESLEAEARGLYTGSIGYLNPCSGGLGFEGTFNVVIRTLSLTPLSDGIYQGVYGVGSGIVIDSDPAAEYRECGWKARFLNELRPDFGIFETLRAENGRCTLLDRHLCRLKTSAQALNLPLPDGCENQIKQYIADLPDGAFRVKALLASDGISLSRAVLNRLTDKQRVIISPAVLPAQNYLRRFKTTCRALFDQAWQTAETQGAFDSLFFNSDGILLEGGRSNVFIKHRGQWLTPSLDLDILNGIMRQAVLDEPQKYLQTNQVIETHITQKTLQEAEEIRLSNALRGVFAAALA

SEQ ID NO: 2489 - protein, 505 aa, Neisseria
MLYFRYGFLVVWCAAGVSAAYGADAPAILDDKALLQVQRSVSDKWAESDWKVENDAPRVVDGDFLLAHPKMLEHSLRDALNGNQADLIASLADLYAKLPDYDAVLYGRARALLAKLAGRPAEAVARYRELHGENAADERILLDLAAAEFDDFRLKSAERHFAEAAKLDLPAPVLENVGRFRKKTEGLTGWRFSGGISPAVNRNANNAAPQYCRQNGGRQICSVSRAERAAGLNYEIEAEKLTPLADNHYLLFRSNIGGTSYYFSKKSAYDDGFGRAYLGWQYKNARQTAGILPFYQVQLSGSDGFDAKTKRVNNRRLPPYMLAHGVGVQLSHTYRPNPGWQFSVALEHYRQRYREQDRAEYNNGRQDGFYVSSAKRLGESATVFGGWQFVRFVPKRETVGGAVNNAAYRRNGVYAGWAQEWRQLGGLNSRVSASYARRNYKGIAAFSTEAQRNREWNVSLALSHDKLSYKGIVPALNYRFGRTESNVPYAKRRNSEVFVSADWRF

SEQ ID NO: 2490 - protein, 544 aa, Neisseria
MAAKDVQFGNEVRQKMVNGVNILANAVRVTLGPKGRNVVVDRAFGGPHITKDGVTVAKEIELKDKFENMGAQMVKEVASKTNDVAGDGTTTATVLAQSIVAEGMKYVTAGMNPTDLKRGIDKAVAALVDELKNIAKPCDTSKEIAQVGSISANSDEQVGAIIAEAMEKVGKEGVITVEDGKSLENELDVVEGMQFDRGYLSPYFINDAEKQIAALDNPFVLLFDKKISNIRDLLPVLEQVAKASRPLLIIAEDVEGEALATLVVNNIRGILKTVAVKAPGFGDRRKAMLQDIAILTGGVVISEEVGLSLEKATLDDLGQAKRIEIGKENTTIIDGFGDAAQIEARVAEIRQQIETATSDYDKEKLQERVAKLAGGVAVIKVGAATEVEMKEKKDRVEDALHATRAAVEEGVVAGGGVALLRARAALENLHTGNADQDAGVQIVLRAVESPLRQIVANAGGEPSVVVNKVLEGKGNYGYNAGSGEYGDMIEMGVLDPAKVTRSALQHAASIAGLMLTTDCMIAEIPEDKPAVPDMGGMGGMGGMM

SEQ ID NO: 2491 - protein, 96 aa, Neisseria
MTIRPLHDRVVVKRLEAEEKTASGIVLPGAAAEKPDMGEVIAVGAGKIGKDGSRRPLDVKVGDKIIFGKYSGQTVKADGEELLVMREEDIFGIVEK

SEQ ID NO: 2492 - protein, 511 aa, Neisseria
MSDSKTKERATFGTRRAFMIAAIGSAVGLGNIWRFPYIAFENGGGAFILPYLVALLTAGIPLLLLDYAIGHRYRGSAPLAFRRLGRWFEPVGWWNVMTNIVICIYYAVIIGWAASYTYYSVNAAWGADPQGFFFKDFLQMAGPEALGLDFVGKVAGPLAGVWVFTAAIMALGVQKGVARASSFFMPLLLVMFLIMVGISLTLPGAAKGLDALFTPDWSKLADSKVWVAAYGQIFFSLSICFGIMVTYSSYLKKKTDLGGTGLVVGFANSSFELLAGIGVFAALGFMAQAGGKAVNEVASGGIGLAFIAFPTIINQAPMGWLIGILFFGSLVFAGVTSMISILEVIVAAIQDKLNIGRVNATLLVCIPMGIVSTLLFGTATGLPVLDVMDKFVNTYGIVAAGFVYVAAIIISGRLPELRKHLNALSSIRIGGLWTVCVVVTVVMLGYMLFKDTSGLMEKNYEGYPDGFLSIFGWGMSAALVVFGLLLSLLPWKHGQDFNVKDEHEHEQGEEK

SEQ ID NO: 2493 - protein, 414 aa, Neisseria
MTLFCEQVPYPRLAEAFGTPLYVYSQSALTEAFEHYQTAFAALNPLVCYAVKANGNLSIIKHFASLGSGFDIVSGGELARVLAAGGDAAKTIFSGVGKSEAEIEFALNAGVKCFNMESIPEIDRIQKVAARLGKTAPVSLRINPDVDAKTHPYISTGLKANKFGIAYADALEAYHYAAQQPNLKIIGIDCHIGSQLTDLSPLVEACERILILVDALAAEGIVLEHLDLGGGVGIVYQDENVPDLGAYAQAVQKLIGTRRLKLILEPGRSLVGNAGSLLTRVEFVKYGEEKNFVMVDAAMNDLMRPALYDAYHHIEAVETKDIATLTANIVGPICETGDFLGKDRTIACEEGDLLLIRSAGAYGASMASNYNARNRAAEVLVDGNEYRLIRRRETLEQQMANELACLQAEHQNAV

SEQ ID NO: 2494 - protein, 56 aa, Neisseria
MKYGVFFAAATALLLSACGYKGDLYLPKEGDKARFGVIQTGLQLQSKPQSAPQTQK

SEQ ID NO: 2495 - protein, 107 aa, Neisseria
MMTESEFIRASEALFEHIEDQIDENGWDFDCRFAGNVLTIEAGDGAQIIVNRHTPNQELWIAAKSGGYHFAEQNGKWLATRDGRDFYDVLNEALSAASGEAVEIAEL

SEQ ID NO: 2496 - protein, 338 aa, Neisseria
MNTRPFYFGLIFIAIIAILANYLGNTDFSHHYHISALIIAILLGMAIGNTIYPQFSTQVEKGVLFAKGALLRTGIVLYGFRLTFGDIADVGLNAVVTDAIMLISTFFFTALLGIRYLKMDKQLVYLTGAGCSICGAAAVMAAEPVTKAESHKVSVAIAVVVIFGTLAIFTYPLFYTWSQHLINAHQFGIYVGSSVHEVAQVYAIGENIDPIVANTAVISKMIRVMMLAPFLLMLSWLLTRSNGVSENTSHKITIPWFAVLFIGVAIFNSFDLLPKELVKLFVEIDSFLLISSMAALGLTTQASAIKKAGLKPFVLGILTYLWLVVGGFLVNYGISKLI

SEQ ID NO: 2497 - protein, 139 aa, Neisseria
MAQLPLYLTSEIKDFTVGTPKVLESFSKHIPYGVVFEDDGDTGYFYAASQDGILDALHIYNVEDVSDKHIPNHVLILWDDACTIAALCINDYIHAVYDFVEQAGYCRNGFPEAGGEWVKVENRVLDDELLDKILSRKST

SEQ ID NO: 2498 - protein, 168 aa, Neisseria
MPLLDSFKVDHTRMHAPAVRVAKTMTTPKGDTITVFDLRFCVPNKEILPGKGIHTLEHLFAGFMRDHLNGNGVEIIDISPMGCRTGFYMSLIGTPSEQQVADAWLASMQDVLNVKDQSKIPELNEYQCGTYQMHSLAEAQQIAQNVLARKVAVNKNEELTLDEGLLNA

SEQ ID NO: 2499 - protein, 938 aa, Neisseria
MSNRPTLLLVDGSSYLYRAYHAMGQNLTAPDGAPTGALYGVLNMLRRLRSEYPHDYCAVVFDAKGKNFRHQMFEEYKATRPPMPDDLRPQAEALPDLVRLTGWPVLVIGQVEADDVIGTLAKQGAEHGLRVIVSTGDKDMAQLVDERVTLVNTMSSETLDIEGVKAKFGVRPDQIRDYLALMGDKVDNVPGVEKCGPKTAVKWLEAYGSLAGVMEHASEIKGKVGENLQAALPQLPLSYDLVTIKTDVDLHAELSDGIESLRRTTPKWAQLVVDFKRWGFRTWLKEAESNMNTGSTDDLFGSDSIGEQAALNAEMPFEKQAEKATAPEKLDYQAVTTEAQFAALLDKLSRADTIGIDTETTSLDAMNASLVGISIAFQAGEAVYIPVGHSLTAAPEQLDLQDVLGRLKPHLGNPALKKIGQNLKYDQHVFANYGIALNGIAGDAMLASYIIESHLGHGLDELSERWLGLETITYESLCGKGAKQIGFADVAIGQATEYAAQDADFALRLEAHLRAQMDEKQLEMYEKMELPVAQVLFEMERNGVQIDRAELARQSAELGAELMKLEQEAYAAAGQPFNLNSPKQLQEILFDKMGIPTKGLKKTAKGGISTNEAVLEQLAPDYPLPKIILQNRSLAKLKSTYTDKLPEMISPKDGRVHTTYAQAVAITGRLASNNPNLQNIPIRTEEGRKVRRAFTAPQGSVIVSADYSQIELRIMAHLSGDKTLIAAFQNGEDVHRRTAAEVFGTAPENVSSEQRRYAKSINFGLIYGMGQYGLAKSLGIDNLSAKNFIDRYFARYPGVAEYMQRTKEQAAAQGYVETLFGRRLYLPDIRNKNANARAGAERAAINAPMQGTASDLIKRAMIDVSRWLSECEASPWDELLQSKLIMQVHDELVLEVVETELDFVKEKLPQIMAKVDGGLLDVPLVAEVGVGENWEEAH

SEQ ID NO: 2500 - protein, 223 aa, Neisseria
MFPDKYKLSLKENIFLAKKVLVAQIHNLSRFENCQTTLLQTEQIIHGKNVASASLEDIQTILNLKRAYQYVISHISNGEPVDISLLKKINNIVAKDDSLAPGDFRTGSVGVTLLDGSRHAPNPVKEIEVARVLQNIGLQSGSTTEAAVRFMLYCMRQQVFWDGNKRTATLFANGLMMAGGCGILEISEMQMPQFNEKLSAFYRSGDDTDISKFVYQNCISGID

SEQ ID NO: 2501 - protein, 1457 aa, Neisseria; identical to SEQ ID NO: 325

SEQ ID NO: 2502 - protein, 143 aa, Neisseria
MTENAQDKARQAVETVVKSPELVEQILSDEYVQIMIARCFHSGPLPPPSDLAQYNDIISNGADRIMAMAEKEQAVRHETIRQDQTFNRRGQLYGFISAILILLFAVFLVWSGYPATAASLAGGTVFALAGAFVIGRSRDQGKN

SEQ ID NO: 2503 - protein, 448 aa, Neisseria
MSDNVPTIAAVATAPGRGGVGVIRISGKNLLPMAQALCGKTPKPRTATYADFTDTDGQAIDSGLLLFFAAPASFTGEDVIELQGHGGPVVMDMLLNRCLELGARLAEPGEFTKRAFLNDKLDLAQAEGVADLIDASSRSAARLALRSLKGDFSRRIHGLVEDLITLRMLVEATLDFPEEDIDFLEAADARGKLDGLRRAVDDVLANAQQGAILREGLNVVLVGAPNVGKSSLLNALAGDEVAIVTDIAGTTRDAVRERILIDGVPVHIVDTAGLRETDDVVERIGIERSRKAVSEADVALVLVDPREGLNEKTRAILDALPPELKRIEIHSKSDLHAHAAGGFGTGAETVIALSAKTGDGLDALKRTLLREAGWQGESEGLFLARTRHVNALKAAQEELSLAALCGNHQIELFAEHLRLAQVACGEITGEFTADDLLGVIFSRFCIGK

SEQ ID NO: 2504 - protein, 714 aa, Neisseria
MNTPLFRLSLLSLTLAAGFAHAAENNAKVVLDTVTVKGDRQGSKIRTNIVTLQQKDESTATDMRELLKEEPSIDFGGGNGTSQFLTLRGMGQNSVDIKVDNAYSDSQILYHQGRFIVDPALVKVVSVQKGAGSASAGIGATNGAIITKTVDAQDLLKGLDKNWGVRLNSGFASNEGVSYGASVFGKEGNFDGLFSYNRNNEKDYEAGKGFRNNFNGGKTVPYSALDKRSYLAKIGTSFGDGDHRIVLSHMKDQHRGIRTVREEFTVGGDKERISMERQAPAYRETTQSNTNLAYTGKNLGFVEKLDANAYVLEKERYSADDSGTGYAGNVKGPNHTQITTRGMNFNFDSRLAEQTLLKYGINYRHQEIKPQAFLNSQFKIEDKEKATDEEKNKNRENEKIAKAYRLTNPTKTDTGAYIEAIHEIDGFTLTGGLRYDRFKVKTHDGKTVSSNNLNPSFGVIWQPHEHWSFSASHNYASRSPRLYDALQTHGKRGIISIADGTKAERARNTEIGFNYNDGTFAANGSYFWQTIKDALANPQNRHDSVAVREAVNAGYIKNHGYELGASYRTGGLTAKVGVSHSKPRFYDTHKDKLLSANPEFGAQVGRTWTASLAYRFQNPNLEIGWRGRYVQKAVGSILVAGQKDRNGKLENVVRKGFGVNDVFANWKPLGKDTLNVNLSVNNVFNTFYYPHSQRWTNTLPGVGRDVRLGVNYKF

SEQ ID NO: 2505 - protein, 321 aa, Neisseria; identical to SEQ ID NO: 451

SEQ ID NO: 2506 - protein, 322 aa, Neisseria
MTAKPFSLNLTNLLLLAVLFAVSLSVGVADFRWSDVFSLSDSQQVMFISRLPRTFAIVLTGASMAVAGMIMQILMRNRFVEPSMVGASQSAALGLLLMTLLLPAAPLPAKMSVAAVAALIGMLVFMLLIRRLPPTAQLMVPLVGIIFGGVIEAVATFIAYENEMLQMLGVWQQGDFSSVLLGRYELLWITGGLAVFAYLIADRLTILGLGETVSVNLGLNRTAVLWSGLIIVALITSLVIVTVGNIPFIGLVVPNIISRLMGDRLRQSLPAVALLGASLVLLCDIIGRVIVFPFEIPVSTVFGVLGTALFLWLLLRKPAYAV

SEQ ID NO: 2507 - protein, 324 aa, Neisseria
MPSEKNIGFMAGSSRPLWVAFALLLVSCVLFMTLNVKGDWDFVLQLRLTKLAALLMVAYAVGVSTQLFQTLTNNPILTPSILGFDSLYVFLQTLLVFTFGGVGYASLPLTGKFGFELVVMMGGSLLLFYTLIKQGGRDLSRMILIGVIFGILFRSLSSLLSRMIDPEEFTAAQANMFAGFNTVHSELLGIGALILLVSAAVVWRERYRLDVYLLGRDQAVNLGISYTRNTLWILLWIAALVATATAVVGPVSFFGLLAASLANHFSPSVKHSVRLPMTVCIGGILLVGGQTVFEHLLGMQAVLSVVVEFAGGLVFLYLVLKHKK

SEQ ID NO: 2508 - protein, 208 aa, Neisseria
MTQEHFPSFFNQAPTITVQDALAEFLGAAENGILTYRYADAVRLCGHSCPTVAGAYLMVIKGLKALYGEELPERGGIEAFMQGARDEGTVGVTASVVQLLTGAAPETGFGGIGMQGRFARRHLLSFGVGEINGTLTLRRKDNGKTVAVGLNAALQPFAPEMRDIMPKAVSGSASAEELERFGQLWQARVKAFLTESADDPQFVIVREV

SEQ ID NO: 2509 - protein, 252 aa, Neisseria
MITIRNVSYRIGTRPILDNVSLDIPEGGITALVGPNGAGKSTLFSFMARLRPLESGSIAYRGKNLADTPTAELAKTLSILTQENSIMSRITVRDLLMFGRYPYHQGRPTAECRRIVNGAIEEFHLQDLSDRYLTELSGGQRQRAMIAMVFCQSTDYVLLDEPLNNLDMYHARSLMQILRRLTDEHKRTTVVVLHDINQAAAYADHVVAMKNGQVAMQGKPNDIFTAANIKTLFDMDVDVLDYEGKKLVIHHI

SEQ ID NO: 2510 - protein, 364 aa, Neisseria
MSMKHFPSKVLTTAILATFCSGALAATSDDDVKKAATVAIVAAYNNGQEINGFKAGETIYDIGEDGTITQKDATAADVEADDFKGLGLKKVVTNLTKTVNENKQNVDAKVKAAESEIEKLTTKLADTDAALADTDAALDETTNALNKLGENITTFAEETKTNIVKIDEKLEAVADTVDKHAEAFNDIADSLDETNTKADEAVKTANEAKQTAEETKQNVDAKVKAAETAAGKAEAAAGTANTAADKAEAVAAKVTDIKADIATNKADIAKNSARIDSLDKNVANLRKETRQGLAEQAALSGLFQPYNVGRFNVTAAVGGYKSESAVAIGTGFRFTENFAAKAGVAVGTSSGSSAAYHVGVNYEW

SEQ ID NO: 2511 - protein, 112 aa, Neisseria
MKKIEAIVKPFKLDDVREALTEIGITGMTVSEVKGFGRQKGHTEIYRGAEYAVDFLPKIKIELVLADDAVERAIDVIVEVARSGKIGDGKIFVLPVEEAIRIRTGERSDAAV

SEQ ID NO: 2512 - protein, 1320 aa, Neisseria
MSVVLPLRGVTALSDFRVEKLLQKAAALGLPEVKLSSEFWYFVGSEKALDAATVEKLQALLAAQSVEQTPKAREGLHLFLVTPRLGTISPWASKATNIAENCGLAGIERIERGMAVWLEGRLNDEQKQQWAALLHDRMTESVLPDFQTASKLFHHLESETFSGVDVLGGGKEALVKANTEMGLALSADEIDYLVENYQALQRNPSDVELMMFAQANSEHCRHKIFNADFILNGEKQPKSLFGMIRDTHNAHPEGTVVAYKDNSSVIEGAKIERFYPNAAENQGYRFHEEDTHIIMKVETHNHPTAIAPFAGAATGAGGEIRDEGATGKGSRPKAGLTGFTVSNLNIPDLKQPWEQDYGKPEHISSPLDIMIEGPIGGAAFNNEFGRPNLLGYFRTFEEKFDGQVRGYHKPIMIAGGLGSIQAQQTHKDEIPEGALLIQLGGPGMLIGLGGGAASSMDTGTNDASLDFNSVQRGNPEIERRAQEVIDRCWQLGGKNPIISIHDVGAGGLSNAFPELVNDARRGAVFKLREVPLEEHGLNPLQIWCNESQERYVLSILEKDLDAFRAICERERCPFAVVGTATDDGHLKVRDDLFANNPVDLPLNVLLGKLPKTTRTDKTVAPSKKPFHAGDIDITEAAYRVLRLPAVAAKNFLITIGDRSVGGLTHRDQMVGKYQTPVADCAVTMMGFNTYRGEAMSMGEKPTVALFDAPASGRMCVGEAITNIAAVNIGDIGNIKLSANWMAACGNEGEDEKLYRTVEAVSKACQALDLSIPVGKDSLSMKTVWQDGEEKKSVVSPLSLIISAFAPVKDVRKTVTPELKNVEDSVLLFVDLGFGKARMGGSAFGQVYNNMSGDAPDLDDTGRLKAFYSVIQQLVAENKLLAYHDRSDGGLFAVLVEMAFAGRCGLDIDLNLLLAQTFITNHTALSQSLRTEEVKALAEWQETIARTLFNEELGAVIQVRKQDVADIINLFYQQQLHHNVFEIGTLTDENTLIIRDGQTHLISDNLIKLQQTWQETSHQIQRLRDNPACADSEFALIGDNERSALFADVKFDVNEDIAAPFINSGAKPKIAILREQGVNGQIEMAAAFTRAGFDAYDVHMSDLMAGRIHLADFKMLAACGGFSYGDVLGAGEGWAKSILFHPALRDQFAAFFADPDTLTLGVCNGCQMVSNLAEIIPGTAGWPKFKRNLSEQFEARLSMVHVPKSASLILNEMQGSSLPVVVSHGEGRADFALHGGNISADLGIALQYIDGQNQVTQTYPLNPNGSPQGIAGVTNADGRITIMMPHPERVYRAAQMSWKPEGWTELSGWYRLFAGARKALG

SEQ ID NO: 2513 - protein, 252 aa, Neisseria
MKITPVKALTDNYIWMIQHGNHAVCVDPSEPSPVLEFLVRNRLMLAQTWVTHPHPDHEGGAAALWRGYMESPVYGESDIEAATHTVTAGTQFTFGDGQVTVWATPGHTDRHTSYLLETSDGIHVFCGDTLFSAGCGRVFTGTIEQLYDSFQRFNRLPENTLFYPAHEYTAANLRFAAHIEPDNADIQTALKAAAHTPTLPVTLAHERRVNPFLRVDLPHVRDRAEALSGKTLNSSLDTFVALRELKNQYRTK

SEQ ID NO: 2514 - protein, 1431 aa, Neisseria
MRFTHTTPFCSVLSTLGLFAVSPAYSSIVRNDVDYQYFRDFAENKGAFTVGASNISIQDKQGKILGRVLNGIPMPDFRVSNRQTAIATLVHPQYVNSVKHNVGYGSIQFGNDTQNPEEQAYTYRLVSRNPHPDYDYHLPRLNKLVTEISPTALSSVPLLGNGQPKANAYLDTDRFPYFVRLGSGTQQVRKADGTRTRTAPAYQYLTGGTPLKVLGFQNHGLLVGGSLTDQPLNTYAIAGDSGSPLFAFDKHENRWVLAGVLSTYAGFDNFFNKYIVTQPEFIRSTIRQYETRLDVGLTTNELIWRDNGNGNSTLQGLNERITLPIANPSLAPQNDSRHMPSEDAGKTLILSSRFDNKTLMLADNINQGAGALQFDSNFTVVGKNHTWQGAGVIVADGKRVFWQVSNPKGDRLSKLGAGTLIANGQGINQGDISIGEGTVVLAQKAASDGSKQAFNQVGITSGRGTAVLADSQQIKPENLYFGFRGGRLDLNGNNLAFTHIRHADGGAQIVNHNPDQAATLTLTGNPVLSPEHVEWVQWGNRPQGNAAVYEYINPHRNRRTDYFILKPGGNPREFFPLNMKNSTSWQFIGNNRQQAAEQVAQAENARPDLITFGGYLGENAQTGKAAPSYSKTNEAAIEKTRHIANAAVYGRPEYRYNGALNLHYRPKRTDSTLLLNGGMNLNGEVLIEGGNMIVSGRPVPHAYDHQAKREPVLENEWTDGSFKAARFTLRNHARLTAGRNTAHLDGDITAYDLSGIDLGFTQGKTPECYRSYHSGSTHCTPNAVLKAENYRALPATQVRGDITLNDRSELRLGKAHLYGSIRAGKDTAVRMEADSNWTLSQSSHTGALTLDGAQITLNPDFANNTHNNRFNTLTVNGTLDGFGTFRFLTGIVRKQNAPPLKLEGDSRGAFQIHVKNTGQEPQTTESLALVSLNPKHSHQARFTLQNGYADLGAYRYILRKNNNGYSLYNPLKEAELQIEATRAEHERNQQAYNQLQATDISRQVQHDSDATRQALQAWQNSQTELARIDSQVQYLSAQLKQTDPLTGILTRAQNLCAAQGYSADICRQVAKAADTNDLTLFETELDTYIERVEMAESELDKARQGGDAQAVETARHAYLNALNRLSRQIHSLKTGVAGIRMPNLAELISRSANTAVSEQAAYNTGRQQAGRRIDRHLTDPQQQNIWLETGTQQTDYHSGTHRPYQQTTNYAHIGIQTGITDRLSVGTILTDERTNNRFDEGVSARNRSNGAHLFVKGENGALFAAADLGYSNSRTRFTDYDGAAVRRHAWDAGINTGIKIDTGINLRPYAGIRINRSNGNRYVLDGAEINSPAQIQTTWHAGIRLDKTVELGQAKLTPAFSSDYYHTRQNSGSALSVNDRTLLQQAAHGTLHTLQIDAGYKGWNAKLHAAYGKDSNTARHKQAGIKIGYNW

SEQ ID NO: 2515 - protein, 484 aa, Neisseria
MSIEPTPPNLENDGIENDVERVSADFDRVHSLCEILEPAFEQIENGTPLEDAPLRDKLTELTVLLSELHPADVAAVLESLPPRERNIVWILVKPEDDGEVLLEVSDAVRETLIESMDKDELLAAVDDLDADELAELADDLPHQVVYEALQTRDEEERAQVKAAMSYEDNQVGAIMDFELVSIRADVACEVVLRYLRRFDSLPDHTDKIFVVDENDVLQGVLPIRKLLVADPEDLVENVMAKDVVRFRAEDDVEEAAQAFERYDLVTAPVVDENKKLIGRITIDEMVDVIREESEADMLNMAGLQEEEDLFAPVWDSVKNRWMWLAVNLCTAFLASRVIGAFEGSIEKIVALAALMPIVAGIGGNSGNQTITMIVRAMAMGQLTDMQAGRLLKKEVGVALVNGIIWGTVMGAVSWLLYGSLGIGLVMIAAMTLNLLLAATVGVLIPVVMEKFGRDPALGSSVLITAVTDSGGFLIFLGLATLFLL

SEQ ID NO: 2516 - protein, 302 aa, Neisseria
MNQTAINRADVRTRFIFDDMPVRGLHVRLENVWQHIVKQKNYPAAIRRALGELLAAGVLLSGNLKNEGTLIVQVQGRGRLKMLVAEAASDRTVRATARWDETAEIADDESLGDLLGEGGVFVLTLQPKDGEPWQGVVPLEGGGIAQMLVNYMKRSEQLDTHIVLSASDEAAGGLLVQRLPEEVLDEEAWEHVSTLARTLTAEELAGLDAQHVLYRLFHETPPRVFEPETFEFSCTCSRGKVSDMLLMLGGEEVGGVVVEQGSIEVDCDFCHSKYVFDETDVNALFGEDVVGVAKGLPRHTVQ

SEQ ID NO: 2517 - protein, 251 aa, Neisseria
MDSFFKPAVWAVLWLMFAVRPALADELTNLLSSREQILRQFAEDEQPVLPINRAPARRAGNADELIGSAMGLNEQPVLPVNRVPARRAGNADELIGNAMGLNEQPVLPVNRAPARRAGNADELIGNAMGLLGIAYRYGGTSVSTGFDCSGFMQHIFKRAMGINLPRTSAEQARMGTPVARSELQPGDMVFFRTLGGSRISHVGLYIGNNRFIHAPRTGKNIEITSLSHKYWSGKYAFARRVKKNDPSRFLN

SEQ ID NO: 2518 - protein, 72 aa, Neisseria
MSMPEMPKWYDDDGQIVSCTEKVKVMSENMAELYQTAQDAFEDALLMGCGERQLRDYLLALIEGLENPYRKV

SEQ ID NO: 2519 - protein, 115 aa, Neisseria
MNIIRALLIILGCLATGETAVFLAGIKLPGSIVGMGVLFALLQAGWVKTSWLQQLTDALMSNLTLFLVPPCVAVISYLDLIADDWFSILVSASASTLCVLLVTGKVHRWIRGIIR

SEQ ID NO: 2520 - protein, 230 aa, Neisseria
MNEILRQPSVLLFLTLAVYALAIIVRTRTGNIFCNPVLVSTIVLIAYLKILGIDYAVYHNAAQFIDFWLKPAVVVLAVPLYQNRRKIFNQWLPVIVSQLAGSVTGIVTGMYFAKWLGAEREVVLSLASKSVTNPIAIEITRSIGGIPAITAATVIIAGLVGQIAGYKMLKNTVVMPSSVGMSLGTASHAMGIAASLERSRRMAAYAGLGLTFNGVLTALIAPLLIPVLGF

SEQ ID NO: 2521 - protein, 406 aa, Neisseria
MAVNLTEKTAEQLPDIDGIALYTAQAGVKKPGHTDLTLIAVAAGSTVGAVFTTNRFCAAPVHIAKSHLFDEDGVRALVINTGNANAGTGAQGRIDALAVCAAAARQIGCKPNQVLPFSTGVILEPLPADKIIAALPKMQPAFWNEAARAIMTTDTVPKAASREGKVGDKHTVRATGIAKGSGMIHPNMATMLGFIATDAKVSQPVLQLMTQEIADETFNTITVDGDTSTNDSFVIIATGKNSQSEIDNIADPRYAQLKELLCSLALELAQAIVRDGEGATKFITVRVENAKTRDEARQAAYAVARSPLVKTAFFASDPNLGRLLAAIGYAGVADLDTDLVEMYLDDILVAEHGGRAASYTEAQGQAVMSKAEITVRIKLHRGQAAATVYTCDLSHGYVSINADYRS

SEQ ID NO: 2522 - protein, 469 aa, Neisseria
MTSTFPRRLARKIRQTRRLSRKSIAFLFLLAGSALVALTALFFAHLADFALELNAKLVQQYPWFAWVALPLGLPLIAWLTRKFAPFTAGSGIPQVIASLSLPYGAQKTRLIRLGQTLLKIPLTFLGMLFGASIGREGPSVQVGAAVMGAWGAWCKKHGLAFKGMQENDLMAAGAAGGLAAAFNAPLAGVIFAIEELGRGIMLRWERQILLGVLASGFIQVAIQGNNPYFSGFNGGVLEHIFLWVALSGLVCGAAGGLFGRLLYRGAAAFAPRKIRGFIRNRPLLLAALMGLLLALLGTFYQGKTYGTGYHEAAQALHGIYEAPFGLAAAKWLATVFSYWAGVPGGIFTPSLTIGAVLGEHIAAIADISQGANIIVLICMAAFLAGATQSPITSAVVVMEMTGGQSLLFWMLIACIFASQVSRQFSPRPFYHASGMRFRQRVLQETAAQTGNAPARPQTANSKTGMPSEN

SEQ ID NO: 2523 - protein, 463 aa, Neisseria
MFPDFSQTLSKDRHFLRSAFKNPNKYGGLSKIEEKYRKSHEIFLKRLAALPKPEFDNTLPVHEKLEEIKKAIAKNQVTIICGETGSGKTTQLPKICLELGRGAAGLIGHTQPRRLAARSVAERIAEELKSEIGSAVGYKVRFTDHTSRDACVKLMTDGILLAETQTDRYLAAYDTIIIDEAHERSLNIDFLLGYLKQLLPRRPDLKVIITSATIDAERFSRHFNGAPVLEVSGRTYPVEILYRPLTGKDEDDAEVELTDAIVDAADELARHGEGDILVFLPGEREIRETAEALRKSTLRRNDEILPLFARLSHAEQHKIFHPSGAKRRIVLATNVAETSLTVPGIKYVIDTGLARVKRYSARAKVEQLHIEKISQAAARQRSGRCGRVSAGVCIRLFSEEDFNSRPEFTDPEIVRSNLAAVILRMAALKLGDVAAFPFLEMPDSRYINDGFQVLLELGAVEAV

SEQ ID NO: 2524 - protein, 547 aa, Neisseria
MDEIQIPKKVELQTKLENEKIVLSKGSTTIIVGANGTGKTRLAVYIEEQLKEKAHRISAHRALKLNPNVNKIPEKSAKTYLSYGQNWDGIDVSNRKNYRWDNNSYTHLLNDFDWLLQYLFAQQNNIAVANNQKLNRNEKVTNSKTKLDILQEAWETLLPHRKLHITADDIQVSAVDNEELYSASNMSDGERALFYILGQVLSVDDGSVLIFDEPELHIHKSIISNLWDKIEELRPDCSFLIITHDIEFAATRVAKKYVIRNYYPTPAWDISEVPESNFDEETITMILGSRKPILFVEGNNNSLDIATYRYCYPDWTIIPKGACKDVIQSVSSLKKLSNEMPLLNLKCSGIVDLDSRDEREIEQLNNLGIYILPVSEIENLFSLTDVAKEILKLNQYSDEELLNKLNGFKSELIKYIDNELKDDKLDEFVVKQVRRKIDNYLKNIDLSSKITSTDMKKSLLNEISTLTEQKIETWISEIKNEIQRCIEQQDLDKLLTIYDNKGLLAKSACVLKGMRNKHEFESWIMRTLKGRNKDFIDAIRQKLPILD

SEQ ID NO: 2525 - protein, 60 aa, Neisseria
MKNHQTTLSFPTSSSLKPCADKQGLSEDRSQYRLTKLGEQMAHLPIDPKIARILLVLFRF

SEQ ID NO: 2526 - protein, 525 aa, Neisseria
MMKKSFLTLVLYSSLLTASEIAYRFVFGIETLPAAKIAETFALTFVIAALYLFARYKVTRLLIAVFFAFSIIANNVHYAVYQSWMTGINYWLMLKEVTEVGSAGASMLDKLWLPVLWGVLEVMLFCSLAKFRRKTHFSADILFAFLMLMIFVRSFDTKQEHGISPKPTYSRIKANYFSFGYFVGRVLPYQLFDLSRIPAFKQPAPSKIGQGSVQNIVLIMGESESAAHLKLFGYGRETSPFLTRLSQADFKPIVKQSYSAGFMTAVSLPSFFNAIPHANGLEQISGGDTNMFRLAKEQGYETYFYSAQAENEMAILNLIGKKWIDHLIQPTQLGYGNGDNMPDEKLLPLFDKINLQQGKHFIVLHQRGSHAPYGALLQPQDKVFGEADIVDKYDNTIHKTDQMIQTVFEQLQKQPDGNWLFAYTSDHGQYVRQDIYNQGTVQPDSYLVPLVLYSPDKAVQQAANQAFAPCEIAFHQQLSTFLIHTLGYDMPVSGCREGSVTGNLITGDAGSLNIRDGKAEYVYPQ

SEQ ID NO: 2527 - protein, 1139 aa, Neisseria
MQNMKNQVRGSGMDARSNPANVSDGLQNSSGHIGTNTRYRLTKLGEQIARLPIDPKIARILLAAKKHDCMAEILVIASALSIQDPRERPLEARDASAKAHERFTDKQSDFLAYLNIWDSFQRERDKGLSNKQLVQWCRQYFLSHLRMREWRELHHQLAQTAIEMGLTTKEAAFRRPPEVRQLTSSENAGDQDLSAKLKQKQLDKKQHRAQIRAAKEAGYEQIHRALLTGLIANVGMKSPDGNDYTGARGSRFHLFPASALFKAKPKWVMAAELVETTRLYARDVAVIQPEWIEQEAPHLVRYHYFEPHWEQKRGEVVASERVTLYGLTVLPRRPVSYGKVAPEEAREIFIRSALVAQECDLKADFFVHNKKLIKEITELEHKSRKQDVLVDDEALFAFYNERLPEMAWKDAQGSVWGSEDSVRIIESDKAERSSENERNEFRKNKRNGSRQNENHGNTVGWVENPTSAATAKTVGFDNPTYAAQQTTPSPVGEGRGEGKTVAAQTNFSATAANPLPNPLPQEREQSAAASTISDDLRPANLQQTAPSPVGEGWGEGKTVATQTNFSATSTNPLPQEREQSASASTFSDDLRPANLQQPSPSPVGEGWGEGKTVATQTNFSATSTLSDDSKPKKQPAPQKNRLKPLPLADIRTFQAWLKTAERDNPRLLFLSRDDLMQHAAAHITEEQFPKFWQTADGKFKLSYRFEPHHPLDGVTMTVPLTVLNRLHAPSLEWLVPGMIREKIQLQIKALPKQIRRICVPVPEFITQFLSQNPDRNAPILPQLAQAIAKTAGDIRIFEQINQDEWAAFRLPEHCYFNLRIIDDGGQELAGGRKLHELQQQLGQAAAVTFRDNTQEFERDNVTAWDIGTLPESIKFARGKQQLTGYLGLQKEKDGRIALRLFDTTEAAEQAHRQGVIELMKLQLKEQVKDLNKGIQGFTQAAMLLKHINADTLRDDLTQAVCDRAFIGEDELPRNEKAFKEQIKRARSRLPAVKEALSRYLQETAAVYAELNSKLGKHPLTHLLRLRLQTLLAAGFATRTPWAQWPRLPIYLKAMTLRLEKYSSNPARDAAREADIQELEQMWQEKTDSLIKQGLPISDGLAAFKWMIEELRVSLFAQELKTPYPVSVKRLLKEWEKIEK

SEQ ID NO: 2528 - protein, 363 aa, Neisseria
MQTFNRERLEFALDKRGCTQTKLAELLGITARQVRNYVKDEQIPDLNELANLLEFPVHFFTNDERLPELKSQAVSFRARSRTSKRLEKQALNHSITAFLLNDWLETEFTLSQAVLPDFSDISPEEAAQELRLEWGLGNEPIPNMITLLEVKGVRVFSLSLDTKDIDAFCTWYENHPFVFLNTQKSAERSRFDAAHELGHLIRDKYSMEHSKNSEITEDEPRDIIEKEANAFASAFLMPEAALRLYRHVPITIENLLKIKRRFGVSLVALAYRMHKLGMITDRMYIHNLCPLFAKKKYRTIEPEPMEREISSALRKMLTILKNDGIGIEQIAENLNVSPKDVADLTFGLVERDLNRYRKLRLVK

SEQ ID NO: 2529 - protein, 214 aa, Neisseria
MVEFALSEPFPFEVGEIVEQQNSDIALSEISKYLSQEMLKEIVLTAHNNIQDKAALSDRNTLGMYRQAEITFALRVYLSKDGWTLEPWSGGAFLCLSPCRTKSIIVATATSDVGRHHGMPMTTARKGKGFEEAIRNSKLDLPDTVQFWVLLFHWKYNKVQLELSLPSGFVSHQITGYKQRIILADVDLTKFDELERKQPVEEYEPLVERKQKAG

SEQ ID NO: 2530 - protein, 82 aa, Neisseria
MRSLLVRAMFGERMVGRFVLQSGKRSSENRVQTTFWFSWEGLWFKKTACVCTAHTLHTDSKFCVICRSGVPKDKDTVGQATY

SEQ ID NO: 2531 - protein, 89 aa, Neisseria
MSNVHPYTIFATMPHKSTAKDILIMSYDLSKRLVIGLASSALFDLSESDNIFRMEGAETYRQYQREKQNHPLKKALSFHLLKNFCQSMK

SEQ ID NO: 2532 - protein, 149 aa, Neisseria; identical to SEQ ID NO: 411

SEQ ID NO: 2533 - protein, 148 aa, Neisseria
MSVMAGRHPYGVRSGLRRNGLKLWDIHFRMTRFIVARCGLLFATLKGKTMKKMFVLFCMLFSCAFSLAAVNINAASQQELEALPGIGPAKAKAIAEYRAQNGAFKSVDDLTKVKGIGPAVLAKLKDQASVGAPAPKGPAKPAIPAAKK

SEQ ID NO: 2534 - protein, 220 aa, Neisseria
MDMLEILFRHQDFVAINKPGGISVHQDSGETGLARTLAIQLGVERVWLLHRLDKQTSGILLFALNKESASALSGQFAGKSIKKTYLALSDRKPSKKQGWIKGGMEKSRCGMWKLTRNTENIAVTRFHSISIAEKLRLFILEPHTGKTHQLRVAMKSLGSPILGDSLYGGTESETMFLYAWKIQFDYQNRQIEIVAPLKNEWQTENIHRALEEFCMENKID

SEQ ID NO: 2535 - protein, 170 aa, Neisseria
MLPNTPRRAVYAGSFDPPTLGHLWMIRQAQSMFDELIVAIGINPDKRSTYTVAERQDMLCDITKMFPNVRTDVFENRFLVHYAREVDAGFIVRGIRSASDYEYERSMRHINSDLAPEISTVFLMPPREIAEVSSTMVKGLVGPEGWTETIHRYVPQAVYEKILAEHQHEN

SEQ ID NO: 2536 - protein, 227 aa, Neisseria
MQHDVYDYTAHTVSKNTVLQKTYRLLGFSFIPASAGAALAANAGFNFYAAFGSRWIGFAVVLAFFYGMIHFIEKNRYSNTGVTLLMVFTFGMGVLIGPVLQYALHIADGAKIVGIAAAMTAAVFLTMSALARRTRLDMNALGRFLTVGAVILMVAVVANLFLGIPALALTISAGFVLFSSLMIMWQVRTVIDGGEDSHISAALTLFISLYNIFSSLLNILLSLNGED

SEQ ID NO: 2537 - protein, 88 aa, Neisseria
MARMVFCVKLNKEAEGMKFPPLPNELGKRIFENVSQEAWAAWTRHQTMLINENRLSLADPRAREYLAQQMEQYFFGDGADAVQGYVPQ

SEQ ID NO: 2538 - protein, 156 aa, Neisseria
MNITVLAVGTKMPRWVDEAVAEYAKRFGRDVAYALKEIKPEKRGAGVNAAQGMAAEEKRILEAIPQGAFLVVLDERGKAPTSVELAEHLKSWRQNGEHVCFVIGGADGMTDRLKQQARMMMRLSSLTLPHGMVRVFLTEQLYRAVSILHNHPYHRE

SEQ ID NO: 2539 - protein, 128 aa, Neisseria
MNEQELQDLQKMVGVAVNALGDIKAKDISVLETQDKTSLFARMIIASGDSTRQVKALANNVAVDLKEAGFEILSTEGDSGEWTLVDAGDLVVHVMLPAVRDFYDIDTLWGGEKPSFHAGMQKPWHAAD

SEQ ID NO: 2540 - protein, 201 aa, Neisseria
MKKIGLFGGTFDPIHNGHLHIARAFADEIGLDAVVFLPTGGPYHKDAASASAADRLAMVELATAEDARFAVSDCDIVREGATYTFDTVQIFRQQFPSAQLWWLMGSDSLMKLHTWKKWQMLVRETNIAVAMRQGDSLHQTPRELHAWLGKSLQDGSVRILSAPMHNVSSTEIRRNLAGQGVSDGIPPAAARYIREHGLYEK

SEQ ID NO: 2541 - protein, 199 aa, Neisseria
MSELDNILAHNRQFVESGEYEKYFTDKYPERGLAVLSCMDARIIGLLPDALGLKNGDAKLIKNAGALVTHPWGSVMRSLLVAVFELKVREIMVIAHHDCGMQGLNAEEFLGRVRESRIPEDRIETLRYAGIDLDGWLTGFDNVEDSVRHTVDLIRNHPLMPRHIAVHGLVIHPVTGKLTLVVDGSVSDGMDLSEGMETS

SEQ ID NO: 2542 - protein, 531 aa, Neisseria
MWGLLGTIATSVFQVGKAMDGRRWVVWGAFALLPSAFLAVMVVAPLWAVAAYDGLAWRAVLSDAYMLKRLAWTVFQAAATCVLVLPLGVPVAWVLARLAFPGRALVLRLLMLPFVMPTLVAGVGVLALFGADGLLWRGRQDTPYLLLYGNVFFNLPVLVRAAYQGFVQVPAARLQTARTLGAGAWRRFWDIEMPVLRPWLAGGVCLVFLYCFSGFGLALLLGGSRYATVEVEIYQLVMFELDMAVASVLVWLVLGVTAAAGLLYAWFGRRAVSDKAVSPVMPSPPQSVGEYVLLAFAAAVLSVCCLFPLLAIVVKAWSAGESWRVLMESETWQAVWNTLRFSAAAVYAAAVLGVVYAAAARRSAWMRGLMFLPFMVSPVCVSAGVLLLYPQWTASLPLLLAMYALLAYPFVAKDVLSAWDALPPDYGRAAAGLGANGFQTACRITFPLLKPALRRGLTLAAATCVGEFAATLFLSRPEWQTLTTLIYAYLGRAGEDNYARAMVLTLLLAAFALGIFLLLDGGEGGKQTETL

SEQ ID NO: 2543 - protein, 461 aa, Neisseria; identical to SEQ ID NO: 293

SEQ ID NO: 2544 - protein, 172 aa, Neisseria
MTTHFVVMGVCGCGKTTAALSLQKHLGQCPYAEGDEFHTQANRDKMGAGIPLTDEDRYPWLGNLRDWMTQQAQNGANHTIVTCSALKRGYRDILRGAEGKAAFIHLSPPQDINLERMMSRKGHYMKAGMLDSQLEILEELGEGEYGVKIANPGTPEAVEADILNWVASENLL

SEQ ID NO: 2545 - protein, 305 aa, Neisseria
MSVYTSVSDDEMRGFLSGYDLGEFVSLQGIAQGITNSNYFLTTTSGRYVLTVFEVLKQEELPFFLELNRHLSMKGVAVAAPVARKDGRLDSVLAGKPACLVACLKGSDTALPTAEQCFHTGAMLAKMHLAAADFPLEMENPRYNAWWTEACARLLPVLSQDDAALLCSEIDALKDNLGNHLPSGIIHADLFKDNVLLDGGQVSGFIDFYYACRGNFMYDLAIAVNDWARTADNKLDEALKKAFIGGYEGVRPLSAEEKAYFPTAQRAGCIRFWVSRLLDFHFPQAGEMTFIKDPNAFRNLLLSLG

SEQ ID NO: 2546 - protein, 242 aa, Neisseria
MGGKMSDKKYNVDEGEIAKFSRIADKWWDKSGEFKTLHDINPLRLDYIDGHADLCGKRVLDVGCGGGILAESMARRGAAFVKGIDMAEQSLETARLHAALNNVADIEYECIRVEDLAEAEPHSFDVVTCMEMMEHVPDPAAIVRACANLVKPDGMVFFSTINKNPKSYLHLIVAAEYLLKFVPKGTHDWKKFIAPAELARMCRQAGLDVADTKGMTYHVLSQTYALCDSTDVNYMFACRPAF

SEQ ID NO: 2547 - protein, 413 aa, Neisseria
MPNKTPSLFGGAMIIAGTVIGAGMLANPTATSGVWFTGSLAVLLYTWFSMLSSGLMILEVNTHYPHGASFDTMVKDLLGRGWNIINGIAVAFVLYLLTYAYIFVGGDLTAKGLGSAAGGDVSLTVGQLVFFGILAFCVWASARLVDRFTGVLIGGMVLTFIWAAGGLIADAKPSVLFDTQAPAGTNYWIYAATALPVCLASFGFHGNVSSLLKYFKGDAPKVAKSIWTGTLIALVIYVLWQTAIQGNLPRNEFAPVIAAEGQVSVLIETLSKFAQTGNMDKILSLFSYMAIATSFLGVTLGLFDYIADIFKWNDSISGRTKTAALTFLPPLISCLLFPTGFVTAIGYVGLAATVWTGIIPAMLLYRSRKKFGAGKTYKVYGGLWLMVWVFLFGIVNIAAQVLSQMELVPVFKG

SEQ ID NO: 2548 - protein, 187 aa, Neisseria
MKLIILDRDGVINQDRDDFVKSVDEWIPVEGSMDAVAFLTQAGYTVAVATNQSGIGRKYFTVQNLTEMHAKMHRLVRQAGGEINGIWFCPHTDADNCNCRKPKPGMIEDIIGRFNAQASETWLVGDSLRDLQAIDAVGGKPALVLTGKGKKTLSQHGHELPEHTQVFDTLLDFSQYIMQENTAPQAD

SEQ ID NO: 2549 - protein, 247 aa, Neisseria
MLIIRNLIYWLILCSTLIFLFPFMLLASPFRDGAHKMARVWVGILNWSLKHIVGLKYRIIGAENIPDRPAVICAKHQSGWETLALQDIFPPQVYVAKRELFKIPFFGWGLKLVKTIGIDRNNRREANEQLIKQGLVRKNEGYWITIFPEGTRLAPGKRGKYKLGGARMAKMFEMDIVPVALNSGEFWPKNSFLKYPGEITVVICPTIPHASGSEAELMEKCEHLIETQQPLISGAGPFAAKMPSETA

SEQ ID NO: 2550 - protein, 230 aa, Neisseria
MTAFVHTLSDGMELTVEIKRRAKKNLIIRPAGTHTVRISVPPCFSVSALNRWLYENEAVLRQTLAKTPPPQTAENRLPESILFHGRQLALTAHQDTQILLMPSEIRVPEGAPEKQLALLRDFLERQAHSYLIPRLERHARTTQLFPASSSLTSAKTFWGVCRKTTGIRFNWRLVGAPEYVADYVCIHELCHLAHPDHSPAFWELTRRFAPYTPKAKQWLKIHGRELFALG

SEQ ID NO: 2551 - protein, 265 aa, Neisseria
MDTAQKQRWAITLSYDGSRFYGWQKQADGVPTVQAALETALAQIAGEAVSTTVAGRTDTGVHATAQVVHFDTTAARPQQAWVRGVNAHLPEGIAVLHARQVAPEFHARFDAYGRHYRYLLESAPVRSPLLKNRAGWTHLKLDIGQMRQAAALLVGEQDFSSFRAAECQAKSPVKTIYRADLTQSSGLVRLDLHGNAFLHHMVRNIMGALVYVGSGRLSVEGFAALIQERSRLKAPPTFMPDGLYLTGVDYPEAYGIIRPQIPEWL

SEQ ID NO: 2552 - protein, 79 aa, Neisseria
MILNIRKMGNSQGVILPKSLLGQIGAVDSLAVTVEKGNIILSCPTVRRGWAEAAAMLVETEQEHFFSEIENEADKEWIW

SEQ ID NO: 2553 - protein, 107 aa, Neisseria
MDMVVRGGIYLVSLDPTVGSEIKKTRPCVVVSPPEIHNYLKTVLIVPMTSGSRPAPFRVNVRFQDKDGLLLPEQIRAVDKAGLVKHLGNLDNSTAEKLFAVLQEMFA

SEQ ID NO: 2554 - protein, 331 aa, Neisseria
MKKSLIALTLAALPVAAMADVTLYGTIKAGVETSRSVFHQNGQVTEVTTATGIVDLGSKIGFKGQEDLGNGLKAIWQVEQKASIAGTDSGWGNRQSFIGLKGGFGKLRVGRLNSVLKDTGDINPWDSKSDYLGVNKIAEPEARLISVRYDSPEFAGLSGSVQYALNDNAGRHNSESYHAGFNYKNGGFFVQYGGAYKRHHQVQEGLNIEKYQIHRLVSGYDNDALYASVAVQQQDAKLTDASNSHNSQTEVAATLAYRFGNVTPRVSYAHGFKGLVDDADIGNEYDQVVVGAEYDFSKRTSALVSAGWLQEGKGENKFVATAGGVGLRHKF

SEQ ID NO: 2555 - protein, 633 aa, Neisseria
MTTPKKTAKTSGNEARELADLSEDIGICFKYPNSERVYLQGSRDDIRVPLREIRQDDTYTAQGTEANPPIPVYDTSGVYGDPAAHIDLKQGLPHIRTAWLDERGDTEILPKLSSEYGIERAHDPKTAHLRFNQITRPRRAKSGSNVTQLHYARQGIITPEMEFVAIRERLKLDELSQKPEYAKLLEQHAGQSFGANIPTHPDQITPEFVRQEIAAGRAIIPANINHPELEPMIIGRNFRVKINGNLGNSAVTSSLTEEVEKMVWSLRWGADTIMDLSTGAHIHETREWIIRNAPVPIGTVPIYQALEKTGGIAEDLTWDLFRDTLIEQAEQGVDYFTIHAGVLLRYVPMTANRLTGIVSRGGSIMAKWCLAHHRENFLYTHFDEICEIMKAYDVSFSLGDGLRPGCIADANDESQFAELHTLGELTDKAWKHDVQVMIEGPGHVPLQRVKENMTEELQHCFEAPFYTLGPLVTDIAPGYDHITSGIGAANIGWYGTAMLCYVTPKEHLGLPDKEDVRTGIITYKLAAHAADLAKGWPGAQLRDNALSKARFEFRWRDQFRLSLDPERAESFHDETLPAEGAKIAHFCSMCGPKFCSMKITQEVRDYADKQKAQRQGMEEKAVEFVKKGAKIYS

SEQ ID NO: 2556 - protein, 291 aa, Neisseria; identical to SEQ ID NO: 206

SEQ ID NO: 2557 - protein, 312 aa, Neisseria
MLELNGLCKRFGNKTVADNICLTVGRGKILAVLGRSGCGKSTLLNIIAGIVRPDGGEIWLNGENITRMPPEKRRISLMFQDYALFPHMSALENAAFGLKMQKMPKAEAERLAMAALAEVGLENEAHRKPEKLSGGEKQRLALARALVVRPSLLLLDESFSSLDTHLRGTLRRMTAERIRNGGIPAVLVTHSPEEACTTADEIAVMHKGRILQYGTPETLVKTPSCVQVARLMGLPNTDDNRHIPQHAVRFDQDGMECRVLSRTCLPESFSLSVLHPEHGILWLNLDMRHAGAVSGKDTVRIHIEEREIVRFR

SEQ ID NO: 2558 - protein, 591 aa, Neisseria
MSIVLHGVAAGKGIAVGCAHLIARGTEEVPQYDVAEADTDAEAERFDAAVKATRKELEQLRSAIPENAPTELGAFISLHLMLLTDVTLSREPVDILREQKINAEWALKQQSDKLAAQFDNMDDAYLRERKQDMLQVVRRIHNNLIGQGNELEVADNLFDETVLIANDLSPADTVLFKEQRIAAFVTDAGGPTGHTAILGRSLDIPSVVGLHNARKLITEGETVIVDGINGVLIIAPDESVLNEYRRRAREYRSHKRDLNKLKKTAAATADGVCIELVGNIESAEDVKPLHNLGADGIGLFRSEFLYLNRDTMPSEDEQYEVYSAIVKKMKGKSVTIRTVDLGVDKNPRWFGKNSTPNGSLNPALGMTGIRLCLAEPVMFRTQMRAILRAAVHGPVRMMWPMITSVSEVRQCLIHLDTAQRQLAERGDAFGKVGIGCMIEIPSAALTVGSILKLVDFISVGTNDLIQYILSVDRGDDSVSHLYQPGHPAVLKMLQHVIRTANRMDKDVSVCGEMAGDTAFTRVLLGMGLRRFSMNPNNILPVKNIILHSNVGQLESDIVKVIRCEDEEKSEKLIKQMNSVSVEEEADFKGRK

SEQ ID NO: 2559 - protein, 89 aa, Neisseria
MLKQSIEIINKLGLHARASNKFTQTASQFKSEVWVTKNDSRVNGKSIMGLMMLAAAKGTVIELETDGADEAEAMRALTDLINGYFGEGE

SEQ ID NO: 2560 - protein, 152 aa, Neisseria
MRNRTHNMIGLLIITHETIGEAYRKLAHHFFPGGLPENVRILGVQPTEDQDDINNNAIAALQEFPDNDGVLIMTDIFGATPCNAARRLVRENKSAILTGLNAPMMVKAVQYSPAAEDLAAFTECVREAAVKGIFAITSAPEDLVCRRSGDAV

SEQ ID NO: 2561 - protein, 187 aa, Neisseria
MTDLETKRLETQAMLENADLLFDQGQCRAALQKVADEITRDLGGKYPLLLPVMGGAVVFTGQLLPLLRFPLDFDYVHVSRYGDKLEGGAFNWKRMPDAEQIRGRHVVVLDDILDEGHTMSAIQAKLLEMGAASCRAAVFANKLIDKPKPIRADYVGLDVPNRYVFGYGMDAAGCWRNLGEIYALGGK

SEQ ID NO: 2562 - protein, 274 aa, Neisseria
MIKKTIGGIIPIFTAVFIPASAGAADLMLAQEYKGQDIAGWAMSEKLDGVRAYWDGKHLMSRQGYAFAPPKGFTAQFPPYPLDGELYSGRGQFEQISATVRSVSSDWRGIRLHVFDVPKAQGNLYQRLAVATQWLKTHPNAPITIIPQIKVRDRQHAMDFLKQIEAQGGEGVMLRQPESRYSGGRSSQLLKLKSQYDDECTVTRHYEGKGRNAGRLGAVGCKNRHGEFRIGSGFKDKDRDNPPKIGTLITYRYRGFTRKGTPKFATFVRVRTDR

SEQ ID NO: 2563 - protein, 210 aa, Neisseria
MTLRYEIFPVTPFRQNCTLIWDDESGEAVLTDVGGDVPFLLQALANRKLTLTAIWLTHGHLDHAGGVVEMLKTHKVPVLGPHPDDEFLLQSLPQTTAQYGFPVSPAFAPNRWLEEGETLTVGRYAFQVLHIPGHTPGHIVFYCAEAELLIAGDVLFYETIGRTDFPRGNHADLINNIRNKLFTLPETVQVVAGHGRMTSIGHEKRHNPFF

SEQ ID NO: 2564 - protein, 594 aa, Neisseria
MELMTVLLPLAALVSGVLFTWLLMKGRFQGEFAGLNAHLAEKAARCDFVEQAHGKTVSELAVLDGKYRHLQDENYALGNRFSAAEKQIAHLQEKEAESARLKQSYIELQEKAQGLAVENERLATQLGQERKAFADQYALERQIRQRIETDLEESRQTVRDVQNDLSDVGNRFAAAEKQIAHLQEKEAEAERLRQSHTELQEKAQGLAVENERLATQIEQERLASEEKLSLLGEARKSLSDQFQNLANTILEEKSRRFTEQNREQLHQVLNPLNERIHGFGELVKQTYDKESRERLTLENELKRLQGLNAQLHSEAKALTNALTGTQNKVQGNWGEMILETVLENSGLQKGREYVVQAASVRKEEDGGTRRLQPDVLVNLPDNKQIVIDSKVSLTAYVRYTQAADADTAARELAAHVASIRAHMKGLSLKDYTDLEGVNTLDFVFMFIPVEPAYLLALQNDAGLFQECFDKRIMLVGPSTLLATLRTVANIWRNEQQNQNALAIADEGGKLYDKFVGFVQTLESVGKGIDQAQSSFQTAFKQLAEGRGNLVGRAEKLRLLGVKAGKQLQRDLVERSNETTALSESLEYAAEDEAV

SEQ ID NO: 2565 - protein, 266 aa, Neisseria
MRAAKMKQTLKNWFAALLLAVPMSAAVASGGGHYEKVDIDLRDQVSLQHGAQIFTNYCLSCHSASGMRFNRLKDIGLTDEEIKKNLMFTTDNVGDVMHSAMNPKDAAKWFGAAPPDLTLIARSKGADYLYAYMRGFYKDPTRPSGWNNTVFDKVGMPHPLWEQQGVQAVELDAKGQPVMVKDEHGEMKPKLYWESTGLHSRRLPNGKVIQKEYDAYVRDLVNYLVYMGEPAQLQRKRIGYVVMIFLFAVMLPLAYFLNKEYWKDVH

SEQ ID NO: 2566 - protein, 449 aa, Neisseria
MANQTNSKAKALLGWVDARFPLSKMWKEHLSEYYAPKNFNFWYFFGSLSMLVLVIQIVSGIFLTMNYKPDGNLNAYHLPAAFTAVEYIMRDVSGGWIIRYMHSTGASFFFIVVYLHMFRGLIYGSYKKPRELVWIFGSLIFLALMAEAFMGYLLPWGQMSFWGAQVIINLFSAIPVIGPDLSTWIRGDFNVSDVTLNRFFALHVIAVPLVLLGLVVAHIIALHEVGSNNPDGVEIKKLKDENGVPLDGIPFFPYYVVHDILAVTIFLIVFCAVMFFAPEGGGYFLEAPNFDAANALKTPPHIAPVWYFTPFYAILRAIPSFAGTQVWGVIGMGAAVVLIALLPWLDKGEVKSVRYRGPIFKTALVLFIIAFIGLGILGAMVATDTRTLVARILSFVYFAFFLGMPFYTKLDTNKPVPERVTMSTTKQKIMFFVYVGITVVGAYLFATNI

SEQ ID NO: 2567 - protein, 193 aa, Neisseria
MDNQEINNGRRRFLTLATCGAGGVAALGVATPFVASFFPSEKAKAAGAAVEVDVSKIEAGQLLTAEWQGKPIWVLNRTDQQLKDLKGLNGELTDPNSDAEQQPEYAKNETRSIKPNILVAIGICTHLGCSPTFRPDIAPADLGADWKGGFFCPCHGSKFDLAGRVYKGVPAPTNLVVPPYKYLSDTTILVGED

SEQ ID NO: 2568 - protein, 249 aa, Neisseria
MVLCRDFLTWCNETLQTALFKDYAPNGLQVEGREYIGKIVTSVTASRAAIDFAVEQKADLLLVHHGMFWKNELPTVTGWKKERIAALLRHDINMAGYHLPLDAHPTLGNNAQLADRLGFATEKRFGEQNLLNSGSLKQAKTLGALAAHIETVLQRKPVVIGNPEREIRRVAWCSGGAQGFFQTAIDEGVDLYLTGEISEAQYHLANETGTAFISAGHHATERYGVRALAESAAEVFGLEVCHFDENNPA

SEQ ID NO: 2569 - protein, 309 aa, Neisseria
MDSIIELRHLKTLLALEETGSVSLAAKRVFLTQSALSHQIRMLENHYGTPLFERKSTPLRFTPVGERLLRLAHELIPQVAVAEWDLARITEGEAGELRIAVECHTCFDWLMPAMGEFRPMWPQVELDIVSGFQADPVGLLLQHRADLAIVSEAEKQNGISFQPLFAYEMVGICAPDHPLAAKNVWTAEDFIGETLITYPVPDEMLDLPKKILIPKNINPPRRHSELTIAIIQLVASRRGIAALPYWTVMPYLEKGYVVHRQITADGLQSKLYAAIRTEDTDKSYLNNFCQIIRERGFADLPGLSELEPV

SEQ ID NO: 2570 - protein, 130 aa, Neisseria
MNGKYYYGTGRRKSSVARVFLIKGTGQIIVNGRPVDEFFARETSRMVVRQPLVLTENAESFDIKVNVVGGGETGQSGAIRHGITRALIDFDAALKPALSQAGFVTRDAREVERKKPGLRKARRAKQFSKR

SEQ ID NO: 2571 - protein, 143 aa, Neisseria
MKTFSAKPHEVKREWFVIDAQDKVLGRVAAEVASRLRGKHKPEYTPHVDTGDYIIVINADKLRVTGAKFEDKKYFRHSGFPGGIYERTFREMQEQFPGRALEQAVKGMLPKGPLGYAMIKKLKVYAGAEHAHAAQQPKVLELK

SEQ ID NO: 2572 - protein, 101 aa, Neisseria
MNIEQVHIEVMHARLTVNTPAEEKDTLLQAVGMLNGKAEAIREGGRVADSEKIVIMAALNVVHDLLKTSLNGGDLAIGDFARKIADMDNACQKALSRLAQE

SEQ ID NO: 2573 - protein, 109 aa, Neisseria
MKQNIEKLESSVYTLVQKFETLVSENRRLKETVAELKRAHERQKLEHETAVDELSEALLVQVGKLKEDLQNKIDSLTEENTRYRSLLEQSREKISALAARLPQWQETQQ

SEQ ID NO: 2574 - protein, 329 aa, Neisseria
MKITVIGAGSWGTALALHFSQHGNRVSLWTRNADQVRQMQEARENKRGLPGFSFPETLEVCADLADALKDSGLVLIVTSVAGLRSSAELLKQYGAGHLPVLAACKGFEQDTGLLTFQVLKEVLPDNKKIGVLSGPSFAQELAKQLPCAVVLASENQEWIEELVPQLNTTVMRLYGSTDVIGVAVGGAVKNVMAIATGLSDGLEYGLNARAALVTRGLAEITRLASAMGAQPKTMMGLAGIGDLILTCTGALSRNRRVGLGLAEGKELHQVLVEIGHVSEGVSTIEEVFNTACKYQIDMPITQTLLQLIRKEMTPQQVVERLMERSARFE

SEQ ID NO: 2575 - protein, 900 aa, Neisseria
MQLHILNNPKDAALAADAEFLKQSLFNLLHEEASPLVVETVKLLSTSDDSAALIEKVLPQLDEQQTHDLTLACGLFAQILNIAEDVHHERRRQIHEEAGRGGAEGSLTETVRRLKAGKADGKSVQRQLDNTSVTAVLTAHPTEVQRQTVLSFNRRIRALLPQRERCTNADALARLRREIDTILLGLWQTSETRRHKLSVNDEINNGVSIFPMSFFEALPKLYRKMEHDFQTAYPGVRVPDILKIGGWIGGDRDGNPFVSAETLRFAFRRHADAVFRFYRGELDKLYRELPLSIRRVKVNGDVTALSDKSPDEEIARAEEPYRRAIAYIMARAMGKARALGLGMGCKFGFLEPYASAQEFLDDLKKLQRSLIDNGSRLLAEGRLADLIRSVSVFGFHMMPLDLRQHAGKHADVVAELFQHAGLEDYNRLNEEQKQTALLRELSHQRPLYSPFITYSDHTRHELAIFNEARKIKDEFGEDAVTQSIISNCEQPSDLLALALLLKETGLLAVENGKPHSRINIVPLFETIEALENACPVMETMFRLDWYDALLESRGNIQEIMLGYSDSNKDGGYVTSSWCLYQAELGLVELFKKYDVRMRLFHGRGGSVGRGGGPSYQAILAQPAGSVAGQIRITEQGEVITAKYADPGNAQRNLETLVAATLEASILPDKKDPDAKLMQALSDVSFKYYRELITHPDFIDYFLQTSPIQEIATLNLGSRPASRKTLARIQDLRAIPWVFSWMQNRLMLPAWYGFGSAVETLCEDKPETLAALREHAQSNPFFQAMLSNMEQVMAKTDITLAENYAGLSESPDKAKIIFGMIKEEYRRSRKALLDLLQTEELLRDNRSLARSLALRIPYLNALNGLQVAMLKRLRKEPDNPHALLMVHLTINGVAQGLRNTG

SEQ ID NO: 2576 - protein, 256 aa, Neisseria
MTTTEHDNDDAFLLRYSRHILLDEIGIEGQQKLSAAHILVVGCGGLGAAALPYLAASGVGTLTIADSDTVELHNLQRQVAFDEGDVGKLKTEALAGRLKRINHTVNVRAVNEKLDGCRLTGLVQAADIVLDCCDNYATRQAVNRACVQTKTPLVSGAAVRFEGQLAVYRPDLPDSPCYACLFDGGSASDGICSLFGVFSPLVGIIGSTQAAEALKILLDAGEPSHGRLAVYRALEGGWQYFDLPRNPECPVCGTAR

SEQ ID NO: 2577 - protein, 74 aa, Neisseria
MDAVQELERRIVELEIQSALQEDVIAGLNAMVAELRQTLDLQQAQLRLLYQKMQDRNPDAQEPYSLRDEIPPHY

SEQ ID NO: 2578 - protein, 462 aa, Neisseria
MNAVVVAVIVMLVLSLSRVHVVLSLTVGAFVGGAVAGMPLQNIADAAGQVSQAGIIPVFNKGLEGGAKIALSYAMLGAFAMAITHSGLPQQLAGAVVRKLNRGGMPDSVRSGEGAVKWLLLSIILVMGMMSQNIIPIHIAFIPMIVPPLLLVFNRLKIDRRLIACVITFGLVTTYMFLPYGFGAIFLNEILLGNIHSAAPQLDVKNINVMAAMAIPALGMLAGLLLAFVHYRKPRLYQSNNADTAGNADAANRPQPSAYRSLAAAVAIAVCFAIQLMYEDSLVLGAMLGFAVFMMLGVINRDKANDVFGEGIKMMAMVGFIMIAAQGFAAVMNATGHIQPLVESSMAIFGNSKGMAALAMLVVGLLVTMGIGSSFSTLPIIAAIYVPLCVGLGFSPLATVAIVGTAGALGDAGSPASDSTLGPTMGLNADGQHDHIRDSVIPTFIHYNIPLLIAGWIAAMVL

SEQ ID NO: 2579 - protein, 423 aa, Neisseria
MQEQNRKPSFPIVMLLVSVALWIASLSNVAFYLGNHGSMEGLTVLILGSIFASLDIRYCAVYANYVWLAAIVLLALRKKVVPVHAALWGLALVAFSVKAVYVDEAGNTSDIVRYGAGFYLWYAAFAVATIGTFAGKNKERKAASAADGIKMTFDKWLGLSKLPKNEARMLLQYVSEYTRVQLLTRGGEEMPDEVRQRADRLAQRRLNGEPVAYILGVREFYGRRFTVNPSVLIPRPETEHLVEAVLARLPENGRVWDLGTGSGAVAVTVALERPDAFVRASDISPPALETARKNAADLGARVEFAHGSWFDTDMPSEGKWDIIVSNPPYIENGDKHLLQGDLRFEPQIALTDFSDGLSCIRTLAQGAPDRLAEGGFLLLEHGFDQGAAVRGVLAENGFSGVETLPDLAGLDRVTLGKYMKHLK

SEQ ID NO: 2580 - protein, 480 aa, Neisseria
MHPTYSAVQARLLEANRLSPELLAKSLCIIGAHHVDYADIYCQRTAYESWHLEEGIVKSGSFQINQGVGVRAVSGDKTAFAYADSLCIDSINRSARAVRAIGAAGGKVSAKMPSETRGKPVCSASDPIAGLDSAAKVALLNKVEAIAKAADPRIVQVMAGLTCEYDMVYLARLDGKHAADIRPMVRLNVTVIAKQGERREQGSAGGGGRYDLAYFDENLVHRFVDAAVKQALTNLESRPAPAGEMTVVLGNGWPGVLLHEAVGHGLEGDFNRKGTSVFSGRIGERVAAKGVTVVDQGDIAGRRGSLNIDDEGNETRRTVLIEDGILVGYMQDETNARLTGTQSTGNGRRESYASAPMPRMTNTFMENGSYEPEEIIASIDKGIYAVNFGGGQVDITSGKFVFSASEAWWVEGGRLQYPVKGATIIGNGPEVLKHVSMIGNDTALDSGVGVCGKEGQSVPVGVGQPTLRIDAGLTVGGSAI

SEQ ID NO: 2581 - protein, 407 aa, Neisseria; identical to SEQ ID NO: 401

SEQ ID NO: 2582 - protein, 366 aa, Neisseria; identical to SEQ ID NO: 406

SEQ ID NO: 2583 - protein, 205 aa, Neisseria
MTFPPLKSPLKFYAVVPTADWVGRMVKAGADTVQLRCKALHGDELKREIARCAAACQGSRTQLFINDHWREAIEAGAYGVHLGQEDMDTADLAAIAAAGLRLGLSTHSVAELDRALSVHPSYIASGAIFPTTTKQMPTAPQGLDKLREYVKQAGGTPVVAIGGIDLNNARAVLATGVSSLAAVRAVTEAANPEAVVKAFQALWDG

SEQ ID NO: 2584 - protein, 64 aa, Neisseria
MNIILNGGPAELHGTTVADLIAQTAPQKPFAVAVNTVFVPKGAYAETVLNENDKIDIVRPVVGG

SEQ ID NO: 2585 - protein, 262 aa, Neisseria
MLTLYGETFPSRLLLGTAAYPTPEILKQSIQTAQPAMITVSLRRAGSGGEAHGQGFWSLLQETGVPVLPNTAGCQSVQEAVTTAQMAREVFETDWIKLELIGDDDTLQPDVFQLVEAAEILIKDGFKVLPYCTEDLIACRRLLDAGCQALMPWAAPIGTGLGAVHAYALNVLRERLPDTPLIIDAGLGLPSQAAQVMEWGFDGVLLNTAVSRSGDPVNMARAFALAVESGRLAFEAGPVEARDKAQASTPTVGQPFWHSAEY

SEQ ID NO: 2586 - protein, 47 aa, Neisseria
MEKPAGKPCRPSRCRNQRNTRPPRCAGCRASPKYGNRRSVLLLFEYT

SEQ ID NO: 2587 - protein, 67 aa, Neisseria
MTTLSAPNRTDVQTRATLFPSGTKPSAMPADPDLSDTMKVCRPESQTSADRLICLFFIVLQKICIYF

SEQ ID NO: 2588 - protein, 288 aa, Neisseria
MKWLFILLVAINIAVFGGTVGYKLTLKQAGRIPEAQNAANNLQVQPVAPTMPVVRNIPASGPVVQAASESDTGALLKQGDILSEEQAEQLRLKKEAEQKKLKEKKQREEKARREKLAAEKAQAERENGAADALCAAQASLTMDEDDYHRIKGLLGKWSHVASRSVEKRTAQAKPADKTYRVVLPVSADAENQAAELSAKGFNPIPFDGALSLGVGNSRENAQALQNRLAGAGFGGAHIVEHFAEADRQDDSLSVSRMTVLFTGVNAADADEIRKITSLYGKLNLKSCK

SEQ ID NO: 2589 - protein, 592 aa, Neisseria; identical to SEQ ID NO: 117

SEQ ID NO: 2590 - protein, 168 aa, Neisseria
MVDAWSVPDFESKICPPEALAARLALLPRPLVFTNGCFDILHRGHVTYLAQARSMGDALVLALNTDASVRRLGKGGDRPVNPLENRAAVAAALESVDLVTWFDGDTPAALIEAVKPEILVKGGDWAADKIVGAAETLARGGQVFSIPFLHQTSTTKTLAKIRAAEGGK

SEQ ID NO: 2591 - protein, 193 aa, Neisseria
MEEKNDYTDAASDNRNGQEIEVGIAGAGDRILAALLNQLFTFLVLLVPFAGLIAFAIKNEGRIGSGEEIFGLLLGMTSFWVGLAGILAYTVIQIYYMSRDGQSLGKKIMRIRVLKTDGRNPGFVGTVLVREIAWSVLVAIIAAVIGLAVGDNGENAINLLAFLANFVLLFMVKRDRRTLYDILADTVVVKLPK

SEQ ID NO: 2592 - protein, 371 aa, Neisseria
MKVGFVGWRGMVGSVLMQRMKEENDFAHIPEAFFFTTSNVGGAAPDFGQAAKTLLDANNVAELAKMDIIVTCQGGDYTKSVFQALRDSGWNGYWIDAASSLRMKDDAIIVLDPVNRDVLDNGLKNGVKNYIGGNCTVSLMLMALGGLFQNDLVEWATSMTYQAASGAGAKNMRELISGMGAVHAQVADALADPAGSILDIDRKVSDFLRSEDYPKANFGVPLAGSLIPWIDVDLGNGQSKEEWKGGVETNKILGRSDNPTVIDGLCVRVGAMRCHSQAITLKLKKDLPVSEIETILAGANDWVKVIPNEKEASIHELTPAKVTGTLSVPVGRIRKLGMGGEYISAFTVGDQLLWGAAEPLRRVLRIVLGSL

SEQ ID NO: 2593 - protein, 176 aa, Neisseria
MQGFELEDLTLWLIRDAGEDQMWIDRWAISYPVVQMSEASAGQSIGEWQAGLQTAFERIRGKYVAVVAHGAGAAAFLAWLYQADILTRKKIANIILVPQRPDIFPDDAEHAFQRVRCPCRAALVVPEHGGVPHGWAQKQADLWNARLLVSPHSGSLNGMLGGWQWGMKLMQEMLLA

SEQ ID NO: 2594 - protein, 114 aa, Neisseria
MLPNKVLGKYDWNVDGKTGIGAAWVVAAFILPMLVWAIFMLSRMQGWLAPTKANPIWALVWLLICLPCLLIASKCLGWKGWRRVVNIFACLTVCAILSVPASLLIAFTLRDLLK

SEQ ID NO: 2595 - protein, 259 aa, Neisseria
MLKIISANVNGIRSAYKKGFYEYIAASGADIVCVQELKAQEADLSADMKNPHGMHGHWHCAEKRGYSGVAVYSKRKPDNVQIGMGIEEFDREGRFVRCDFGRLSVISLYLPSGSSAEERQQVKYRFLDAFYPMLEAMKNEGRDIVVCGDWNIAHQNIDLKNWKGNQKNSGFLPEEREWIGKVIHKLGWTDMWRTLYPDVPGYTWWSNRGQAYAKDVGWRIDYQMVTPELAAKAVSAHVYKDEKFSDHAPLVVEYDYAAE

SEQ ID NO: 2596 - protein, 473 aa, Neisseria
MTTIYNTLTRQKEPFSPIDPENVRMYVCGMTVYDYCHLGHARVMVVFDMIARWLRECGYPLTYVRNITDIDDKIIARAAENGETIGKLTARFIQAMHEDADALGVLRPDIEPKATENIPQMIAMIETLIQNGKAYPAANGDVYYAVREFAAYGQLSGKSLDDLRAGERVEVDGFKRDPLDFVLWKAAKAGEPAWESPWGNGRPGWHIECSAMSENLFGDTFDIHGGGADLQFPHHENEIAQSVGATGHTCGHHHAQTHHGQSIASHVKYWLHNGFIRVDGEKMSKSLGNFFTIREVLKQYDPEVVRFFILRAHYRSPLNYSDAHLDDAKGALTRLYTTLKNTPPADPMPSEAGDDYTRRFYVAMNDDFDTVKAVAVLFELAGEVNKTNDAQLAGRLKALGGIIGLLQRDPTEFLQGGAASDGLSNEEIEDLIARRKQARADKNWAESDRIRDLLNEHKIILEDNAGGTTWRRG

SEQ ID NO: 2597 - protein, 349 aa, Neisseria
MSSNQYIQSLELTNFTVLPNDTFEFSENLNVIVAENGCGKTHLLKILYSLLEVTSNTKNRLLKTELQKSFADKLLNVFRPDSLGRLSKRLQGRGRTEIVLKLQNGTTHSSLNFSSNSSSQVNVQSIGLKENEYTPTPIFLPSRELITLCPWFTSLYQNQSIPFEETWFDTCMQLNHPLAKGPRETKIRELLEPIENAMGGKVSEEQGRFYLSLTNTGGKIEAPLVAEGLRKFVMIARLIATGALLDKGYLFWDEPEANLNPKLIKVAARIIWSLSQQGIQVFIATHSLFLLRELELLKLENNTDLPVRFFSLIASDDGTKVEQGNSINDLNTLILLDENIMQADRYLNI

SEQ ID NO: 2598 - protein, 384 aa, Neisseria
MKFIDEAKIEVAAGKGGNGATSFRREKFVPRGGPDGGDGGKGGSVWAEADENTNTLVEYRFVKRYQAKNGEKGHGSDRYGAGADDIVLKMPVGTLIRDLDTGETVADLTYHGQRVCLAKGGKGGLGNIHFKSSVNRAPKQSTPGEEGEARSLQLELKVLADVGLLGMPNAGKSTLITAVSAARPKIANYPFTTLHPNLGVVRIDENHSFVMADIPGLIEGAAEGAGLGHRFLKHLSRTGLLLHVVDLAPFDETVNPAEEALAIINELRKYDEELYGKPRWLVLNKLDMLDEEEAQTRTAAFLEAVGWDYPKPDDRFQFDMETPRLFQISALTHQGTQELVHQINQYLTEKKRIEAEKAEAEKAAANVEIIEQQPKTDTGVFKPE

SEQ ID NO: 2599 - protein, 120 aa, Neisseria
MATCPATAANSSKPKLPWNVLPKFAIHSIFSGEPLHHFNAEHFQRAAAAAVLADHADNGNSKHEQIQNAVACRRSLAVALRTLGAVGNRPHDAQCNHRQRKETERFVQAEQAAHPFRLFV

SEQ ID NO: 2600 - protein, 291 aa, Neisseria; identical to SEQ ID NO: 144

SEQ ID NO: 2601 - protein, 115 aa, Neisseria
MRLNHKQGEAGEDAALAFLQSQGCTLLARNWHCAYGEIDLIVKNGGMILFVEVKYRKNRQFGGVAYSISPSKLLKLQRSVEYYLQQNRLTNVPCRLDAVLIEGSRPPEWIQNITG

SEQ ID NO: 2602 - protein, 197 aa, Neisseria
MTTLQERVAAHFAESIRAKQEAGKVLVEPTVQAAELMLQCLMNDGKILACGNGGSAADAQHFAAEMTGRFEKERMELAAVALTTDTSALTAIGNDYGFDHVFSKQVRALGRAGDVLVGISTSGNSANVIEAVKAAHERDMHVIALTGRDGGKIAAILKDTDVLLNVPHPRTARIQENHILLIHAMCDCIDSVLLEGM

SEQ ID NO: 2603 - protein, 202 aa, Neisseria
MKPKPHTVRTLIAAIFSLALSGCVSAVIGSAAVGAKSAVDRRTTGAQTDDNVMALRIETTARSYLRQNNQTKGYTPQISVVGYNRHLLLLGQVATEGEKQFVGQIARSEQAAEGVYNYITVASLPRTAGDIAGDTWNTSKVRATLLGISPATQARVKIVTYGNVTYVMGILTPEEQAQITQKVSTTVGVQKVITLYQNYVQR

SEQ ID NO: 2604 - protein, 210 aa, Neisseria
MPSEPPSDGIARHPKSTIKMAKKPNKPFRLTPKLLIRAVLLICIAAIGALAIGIVSTFNPNGDKTLQAEPQHTDSPRETEFWLPNGVVGQDAAQPEHHHAASSEPAQPDGTDESGSGLPSPAAPKKNRVKPQPADTAQTDRQPDDAGTQAENTLKETPVLPTNVPRPEPRKETPEKQAQPKETPKENHTKPDTPKNTPPKPHKEILDNLF

SEQ ID NO: 2605 - protein, 259 aa, Neisseria
MNGIIIKTPEEIEKMRELGKLVAEALDYIGQFVKPGVTTDEIDKLVYDYHVNVQGGYPAPLHYGNPPYPKSCCTSVNHVICHGIPDDKPLKEGDIINIDLTIKKDGFHGDSSRMFTVGKVSPIAQRLIDVTHASMMAGIEAVKPGATLGDVGYACQQVAENAGYSVVQEFCGHGIGRGFHEAPQVLHYGKKGQGPVLKPGMIFTVEPMINQGKRHLRILNDGWTVVTKDRSLSAQWEHEVLVTETGYEILTVSPASGKP

SEQ ID NO: 2606 - protein, 99 aa, Neisseria
MKIFENIEDVKAIRKKTGLNQIDFWGKVGVTQSGGSRYETGRKMPKPVRELLRLVHIECIDLAKVNKKDMEIAALLKKHHPDLYAELSKQTKSERKKQS

SEQ ID NO: 2607 - protein, 124 aa, Neisseria; identical to SEQ ID NO: 453

SEQ ID NO: 2608 - protein, 488 aa, Neisseria
MAEATDVVLVGGGIMSATLGVLLKELEPSWEITLIERLEDVALESSNAWNNAGTGHSALCELNYAPLGANGIIDPARALNIAEQFHVSRQFWATLVAEGKLEDNSFINAVPHMSLVMNEDHCSYLQKRYDAFKTQKLFENMEFSTDRNKISDWAPLMMRGRDENQPVAANYSAEGTDVDFGRLTRQMVKYLQGKGVKTEFNRHVEDIKRESDGAWVLKTADTRNPDGQLTLRTRFLFLGAGGGALTLLQKSGIPEGKGYGGFPVSGLFFRNSNPETAEQHNAKVYGQASVGAPPMSVPHLDTRNVDGKRHLMFGPYAGFRSNFLKQGSLMDLPLSIHMDNLYPMLCAGWANMPLTKYLLGELRKTKEERFASLLEYYPEANPDDWELITAGQRVQIIKKDSEKGGVLQFGTEIVAHADGSLAALLGASPGASTAVPLMIRLMHQCFPERAPSWEDRLKELVPGYGIKLNENPERADEIIAYTAKVLDI

SEQ ID NO: 2609 - protein, 29 aa, Neisseria
MLATHSNPETAYSDTHHCRFSLLLRFRRL

SEQ ID NO: 2610 - protein, 196 aa, Neisseria
MSEKIILPVLSLGGVRLEPLDVHHETGLREAVCDGEVWKLGVTSAPHPDRVADYIGTALATRLAFAVVDEEAGRVVGTTAYYHFEPQIPRLDIGFTWYAASARRTRINTCCKIMLLDSAFDVLACRCVGWRTDILNLASQRAIERLGAEKDGVLRMHMLRKDGSVRDTVVYSMLREDWCKNREILTGRLAGYGVQV

SEQ ID NO: 2611 - protein, 193 aa, Neisseria
MRNEEKRALRRELRGRRSQMGRDVRAAATVKINHLLKRYIKKGRKIGVYWPMGKELRLDGFVRAAQKRGAELYLPYIEPRSRRMWFTPYPADGVKQERKRGRAKLHVPQFAGRKKRVHDLNLLLVPVVGMDRLGYRLGQAGGYYDATLSAMKYRLQAKTVGVGFACQLVDRLPVEAHDRSLDGFVSEAGILCF

SEQ ID NO: 2612 - protein, 77 aa, Neisseria
MWHIVAIGYLFVAVMYSAAQPSIARALIYLVFWAVLPTVFTVFTITVRRRNHLMRQQEQAESEQQRAQRQKDSGTKP

SEQ ID NO: 2613 - protein, 242 aa, Neisseria
MSQITMRQMIEAGVHFGHQTRFWNPKMAQYIFGARNKIHIVNLEKTLPMFQDAQEAVRRLVANKGTVLFVGTKRQARDIIREEATRAGMPFVDYRWLGGMLTNYKTVKQSIKRLEEKTAALENAAESGFSKKEILEMQRDVEKLERSLGGIKNMKGLPDAIFVIDTGYQKGTLVEAEKLGIPVIAVVDTNNSPDGVKYVIPGNDDSAKAIRLYCRGIADAVLEGKNQALQETVAAAQEAAAE

SEQ ID NO: 2614 - protein, 284 aa, Neisseria
MAEITAKMVADLRAATGLGMMECKKALVEAEGNFDKAEEILRIKSGAKAGKLAGRTAAEGVLAYAINGNVGALVEVNCETDFVAKDAGFVEFANFVAKTAAEKKPASVEELSELVEAERKAIIAKLGENMSVRRFQVIDTANQLVAYIHGALATEGVLVEYKGSEDVARKIGMHIVAAKPQCVSEAEVDAETVEKERHIYTEQAIASGKPADIAAKMVEGRIRKFLAEITLNGQAFVMNPDQTVAQFSKENGTEVISFVRYKVGDGIEKKAVDYAAEVAAAAKV

SEQ ID NO: 2615 - protein, 239 aa, Neisseria
MTQQIKYKRVLLKLSGESLMGSDPFGINHDTIVQTVGEIAEVVKMGVQVGIVVGGGNIFRGVSAQAGSMDRATADYMGMMATVMNALALKDAFETLGIKARVQSALSMQQIAETYARPKAIQYLEEGKVVIFAAGTGNPFFTTDTAAALRGAEMNCDVMLKATNVDGVYTADPKKDPSATRYETITFDEALLKNLKVMDATAFALCRERKLNIVVFGIAKEGSLKRVITGEDEGTLVHC

SEQ ID NO: 2616 - protein, 483 aa, Neisseria; identical to SEQ ID NO: 83

SEQ ID NO: 2617 - protein, 118 aa, Neisseria
MNEHNLLIFCLKDNVSISEYTEMVDWAYENIQSETVVEITENQIIEYQNRGLWGLVSEITDNWLFGPSEGDWLIDKESILAVKEKLQNSDFSTEPLVKNIIHVLEYAIKNEKTVIFHF

SEQ ID NO: 2618 - protein, 254 aa, Neisseria
VGFSNPIFSNSGISETIDASNIFVGYKYPTYISAQQTLQDINELGNLSPEAQLAAASLLQDSAFAVKDGINSARQWADAHPNITATAQTALAVAEAATTVWGGKKVELNPTKWDWVKNTGYKTPAVRTMHTLDGEMAGGNRPPKSITSNSKADASTQPSLQAQLIGEQISSGHAYNKHVIRQQEFTDLNINSPADFARHIENIVSHPTNMKELPRGRTAYWDDKTGTIVIRDKNSDDGGTAFRPTSGKKYYDDL

SEQ ID NO: 2619 - protein, 68 aa, Neisseria
MNILSINNQNSTISLTQDEVFVLRAILNEIYAGVCVDSREFENVSGVRKHEVDNLQQQFAGIYKKMTT

SEQ ID NO: 2620 - protein, 83 aa, Neisseria
MDNTRIMAAREAGVKVEANVHNFNDRLSSKERIRFKHDGIEPQTWGEAIQLRIRKQETQKGVPEGWSKRFPNGSIYDVKVLRK

SEQ ID NO: 2621 - protein, 123 aa, Neisseria
MIKQNSFVPYPEAMLPKGFKYPQSYLKLAQSTHAINYDEQYSFPWWFENAESNISEVIDIYFEITGIPNLLPFARNQEWAACFDISDKSGNPKIIVVNLDNTKYYETFENFDTWLKEAENDGW

SEQ ID NO: 2622 - protein, 281 aa, Neisseria
VGFSNPTFFNSGISETIDASNIFVGYKYPTYISAQQTLQDINELGNLSPEAQLAAASLLQDSAFAVKDGINSARQWADAHPNITATAQTALSVAEAATTVWGGKKVNLNPTKWDWVKNTGYKTPAARPMQTLDGEMAGGNKPPKPSTQQHPTHSDNNIGLPASYVKPDTSISPTGTIQDRIRWTKSKFPTEKSLNGHFKAHGKEFGDITIEDYQKMASDLLSKQTSDKILGYQTEHRRVRYDINNNIYVLANPKTFKIKTMFKPNLGKKYYDGEFKKDMGN

SEQ ID NO: 2623 - protein, 89 aa, Neisseria
MMTESHGYLSNNLPVKIINDIIYATQLVEDLVLGKIKIVDFLKSYNNFYCWLGFDELPQSEKIKFLSYLNILSIHKEIQDETVNRVYTD

SEQ ID NO: 2624 - protein, 100 aa, Neisseria
MLNEIFEIYSRQGESLIGIGIREAALPVPIAIDILNLFINERILVLGGDIYIKKDNYFYQTYDNWYYEGSNLFNSIDKAMHYLSQIKLENAYVSFVLKFI

SEQ ID NO: 2625 - protein, 209 aa, Neisseria
MLIQPTLTGSDTAAQQTLQGINDLGNLSPEAQLAAASLLQDSAFAVKNGINSARQWADAHPNITATAQTALSVAEAAGTVWRGKKVELNPTKWDWVKNTGYKKPAARPMQTVDGEMAGGNKSLKIGTQSVEKSTGRTIPNNLKEQLAMEEVKANPQGKTPARIPPMSDTKNGWLAKDGWVKRVQNVNKIEIHYIENSRTGEKTDFKFKD

SEQ ID NO: 2626 - protein, 114 aa, Neisseria
MFLDDVNVFLDDLNVFLDDLNTNPITDEWYMSNFADKHIKILESYEAFDILKQFVDYMIEEYDEKSEYEIMEILRQLKYQADTNEKFYTNTQKQKIVELYKQEISQDILNEIFR

SEQ ID NO: 2627 - protein, 114 aa, Neisseria
MIIEHNGNIHKIARMTGNKNNFLEIILSDIHENIKIKPLTIKVKGENVINILPEEVSFYVKQGVDLIYEKYKRKFFISEISFCQSDSRPSSIYAFLTFHLLEDIIKNESPSNYT

SEQ ID NO: 2628 - protein, 105 aa, Neisseria
MKKNIFHNVSLYEIIFSDNGNTLTLSFTDTIEGNYFGYIKCSNILNFKLDTNNFVDYEDKEDSLFPLFIPEIELYKYQFYSEIIIDVGIIIKISAETINFEPLGK

SEQ ID NO: 2629 - protein, 68 aa, Neisseria
MGDYNDALNDFNSLNVRNVQTRPNGTITGNLPDGRAVNARNDSSGGEPTLEITISNNRKIKIRYGNTR

SEQ ID NO: 2630 - protein, 133 aa, Neisseria
MKLKSLDFPTGYFYFDNAAINSDKVEVIAVGYRNTDKTIKIFIEDVIHFRVVDESYFIDTFMDLISEDADRALLHENGGQSFFELLDECYAEWILKESYFPLNREFFKYYIFMFEQTFIEIIGSSATYSIIEG

SEQ ID NO: 2631 - protein, 114 aa, Neisseria
MNLENYENILIKLLFYHNNLVNEYSYFIENKNLFKIVSRTKTSKGFFFTIEKPLNFLSKKTYFEFNFKYLHSGKERFGSFMCWINTNLMEFEGVFFNDLLPDNMIINNFFEIND

SEQ ID NO: 2632 - protein, 34 aa, Neisseria
MDDIRGIIQGAVNPLIYKVSKQKIIYNNKLISGT

SEQ ID NO: 2633 - protein, 118 aa, Neisseria
MNEHNLLIFCLKDNVSISEYTEMIDWAYKNIQSETVVEITENQIIEYQNRGLWRLVSEITDNWLFGPSEGDWLIDKESILAVKEKLQNSDFSTEPLVKNIIHVLEYAIKNEKTVIFHF

SEQ ID NO: 2634 - protein, 42 aa, Neisseria
MPQTWGEAIQFRIKKQIENELAPPNWSTQFPNGSIYDPKVTK

SEQ ID NO: 2635 - protein, 124 aa, Neisseria
MIIQNEFNLYPSNMLPERFCYPEKYVRISNDTSLIPYIQPHNFHWWFENYGTEGAEVAYIFRNSILPDLNLIPFASNGEWEAYFDGNDVTGNSRVIVINLDNIENHEFFNSFEDWLELAIKDTW

SEQ ID NO: 2636 - protein, 328 aa, Neisseria
MQYRIRRENEAPEAKNAGETLWERDIMREVLLSAYQDRRRERMWKNIWRAVSTLILVALIAGIFRKDEAALQLAGNTPHTAVVNLYGEIGNGVEDQVKKLKDGMEAAYKNPQAKAIVIRANSPGGSPVVSNTAFEEIRRLKAQHPGIPVYLVAEDMCASGCYYIAAAADKIYADPSSIVGSIGVIGSSFDATGLMEKIGVKRRVKIAGSNKGMGDPFSPETPEQSKIWEEMLTGIHGEFIKAVKTGRGGRLKFRQYPDVFSGRVYTGADALKVGLVDGLGNIYSVARDVVKAPDVVDYTPKDDFGRILGRRFGAELKASVREALQAVR

SEQ ID NO: 2637 - protein, 266 aa, Neisseria
MNAFNLIIIGDEILHGSSQDKHFAFFKSLLESKGLKLNQVQYLPDEPDLLVRQLRRSFSDGMPTFVTGGIGATPDDHTRQAAAAALDLPVVRHSEAAKFIEGITQKRGEPLDSPEHAQRLKMADFPEGAELVPNPFNNIAGFSIREHYFFPGFPVMAHPMAEWVLETYYADRFNQTERGSRSVYVFEQPESRITPLMEHIEQTYPGVRSYSLPSVGWTHSDGTQVKPHIEFGIKAEGEAVNLLDAAWAEVLHSLDGLGAELKNRVN

SEQ ID NO: 2638 - protein, 447 aa, Neisseria
MSQNHTILQSLPVGQKVGIAFSGGLDTSAALLWMKLKGALPYAYTANLGQPDEDDYNAIPKKAMEYGAENARLIDCRAQLAHEGIAAIQCGAFHVSTGGIAYFNTTPLGRAVTGTMLVSAMKEDDVNIWGDGSTYKGNDIERFYRYGLLTNPALKIYKPWLDQQFIDELGGRHEMSEFLIANGFNYKMSVEKAYSTDSNMLGATHEAKDLEFLNSGIKIVKPIMGVAFWDENVEVSPEEVSVRFEEGVPVALNGKEYADPVELFLEANRIGGRHGLGMSDQIENRIIEAKSRGIYEAPGMALFHIAYERLVTGIHNEDTIEQYRINGLRLGRLLYQGRWFDSQALMLRETAQRWVAKAVTGEVTLELRRGNDYSILNTESPNLTYQPERLSMEKVEDAAFTPLDRIGQLTMRNLDITDTRVKLGIYSQSGLLSLGEGSVLPQLGNKQ

SEQ ID NO: 2639 - protein, 80 aa, Neisseria
MIPYVKRNPMKEYKVIIYQESLLSSLFFGAAKVNPIKFSEFLNKQTPEGWRVVTMEKDLRRMLLFFKREAYVVILERDRV

SEQ ID NO: 2640 - protein, 71 aa, Neisseria
MFKLGVYTCLGLFAGWVLLLIVQLWFSFLEAELFFKITLTMAGLFVIILAALLVCGQYFSEKKMKDDGFIN

SEQ ID NO: 2641 - protein, 488 aa, Neisseria; identical to SEQ ID NO: 538

SEQ ID NO: 2642 - protein, 409 aa, Neisseria
MAFGKSLFHAIGRVSLVRQIAAGLALGIVIGSVSPQLGLAAGLFGSLFVGALKAVAPVLVFILVAATIAQHQKGNKAHIRPIIVLYLIGTFSAALTAVIAGMVFPTHIVLAGAGDVSAAPPSGIVEVLKSLLMNLVANPINAIANANYIGILAWALVLGAALRNHGSDVTRQVVADLAEAVSTVVKWIIRFAPLGIFGLVSSTIAETGFGALAGYAKLLAVLLGCMAFIALAVNPAIVWWKIRRNPFPLVFTCLRESGVYAFFTRSSAANIPVNMALAKKLGLHEDTYSISIPLGATINMAGAAITITVLAMAAAHTQGITVDFATALLLSLVATVSACGASGVAGGSLLLIPLACSLFGIDNDVAMQVVAVGFIIGVIQDSAETALNSSTDVLFTAAADLGRQRNRAE

SEQ ID NO: 2643 - protein, 635 aa, Neisseria
MPSEASRPVRTVLKSKAATPMHDTRTMMIKPTALLLPALFFFPHAYAPAADLSENKAAGFALFKNKSPDTESVKLKPKFPVLIDTQDSEIKDMVEEHLPLITQQQEEVLDKEQTGFLAEEAPDNVKTMLRSKGYFSSKVSLTEKDGAYTVHITPGPRTKIANVGVAILGDILSDGNLAEYYRNALENWQQPVGSDFDQDSWENSKTSVLGAVTRKAYPLAKLGNTQAAVNPDTATADLNVVVDSGRPIAFGDFEITGTQRYPEQIVSGLARFQPGMPYDLDLLLDFQQALEQNGHYSGASVQADFDRLQGDRVPVKVSVTEVKRHKLETGIRLDSEYGLGGKIAYDYYNLFNKGYIGSVVWDMDKYETTLAAGISQPRNYRGNYWTSNVSYNRSTTQNLEKRAFSGGVWYVRDRAGIDARLGAEFLAEGRKIPGSAVDLGNSHATMLTASWKRQLLNNVLHPENGHYLDGKIGTTLGTFLSSTALIRTSARAGYFFTPENKKLGTFIIRGQAGYTVARDNADVPSGLMFRSGGASSVRGYELDSIGLAGPNGSVLPERALLVGSLEYQLPFTRTLSGAVFHDMGDAAANFKRMKLKHGSGLGVRWFSPLAPFSFDIAYGHSDKKIRWHISLGTRF

SEQ ID NO: 2644 - protein, 1405 aa, Neisseria
MATSDGIAANHFETDIMTDTAPTDTDPTENGTRKMPSEHRPTPPAKKRRPLLKLSAALLSVLILAVCFLGWLAGTEAGLRFGLYQIPSWFGVNISSQNLKGTLLDGFDGDNWSIETEGADLKISRFRFAWKPSELMRRSLHITEISAGDIAIVTKPTPPKEERPPLSLPDSIDLPAAVYLDRFETGKISMGKAFDKQTVYLERLDASYRYDRKGHRLDLKAADTPWSSSSGAASVGLKKPFALDTAIYTKGGLEGKTIHSTARLSGSLKDVRAELAIDGGNIRLSGKSVIHPFAESLDKTLEEVLVKGFNINPAAFVPSLPDAGLNFDLTAIPSFSDGIALEGSLDLENTKAGFADRNGIPVRQVLGGFVIRQDGTVHIGNTSAALLGRGGIRLSGKIDTEKDILDLNIGINSVGAEDVLQTAFKGRLDGSIGIGGTTASPKISWQLGIGTARTDGSLAIASDPANGQRKLVLDTVNIAAGQGSLTAQGYLELFKDRLLKLDIRSRAFDPSRIDPQLPAGNINGSINLAGELAKEKFTGKMRFLPGTFNGVPIAGSADIVYESRHLPRAAVDLRLGRNIIKTDGGFGKKGDRLNLNITAPDLSRFGFGLAGSLNVRGHLSGDLDGGIRTFETDLSGAARNLHIGKAADIRSLDFTLKGSPDTSRPIRADIKGSRLSLSGGAAVVDTADLMLDGTGVQHRIRTHAAMTLDGKPFKFDLDASGGINRELTRWKGSIGILDIGGAFNLKLQNRMTLEAGAERVAASAANWQAMGGSLNLQHFSWDKKTGISAKGGAHGLHIAELHNFFKPPFEHNLVLNGDWDVAYGRNARGYLNISRQSGDAVLPGGQALGLNAFSLKTRFQNDRIGILLDGGARFGRINADLGIANAFGGNMANAPLGGRITASLPDLGALKPFLPAAAQNITGSLNAAAQIGGRVGSPSVNAAVNGSSNYGKINGNITVGQSRSFDTAPLGGRLNLTVADAEVFRNFLPVGQTVKGSLNAAVTLGGSIADPHLGGSINGDKLYYRNQTQGIILDNGSLRSHIAGRKWVIDSLKFRHEGTAELSGTVGMENSGPDVDIGAVFDKYRILSRPNRRLTVSGNTRLRYSPQKGISVTGMIKTDQGLFGSQKSSMPSVGDDVVVLGEVKKEAAAPLPVNMNLTLDLNDGIRFAGYGADVTIGGKLTLTAQSGGSVRGVGTVRVIKGRYKAYGQDLDITKGTVSFVGPLNDPNLNIRAERRLSPVGAGVEILGSLNSPRITLTANEPMSEKDKLSWLILNRAGSGSSGDNAALSAAAGALLAGQINDRIGLVDDLGFTSKRSRNAQTGELNPAEQVLTVGKQLTGKLYIGYEYSISSAEQSVKLIYRLTRAIQAVARIGSRSSGGELTYTIRFDRFSGSDKKDSAGNGKGK

SEQ ID NO: 2645 - protein, 485 aa, Neisseria
MSRHPAPTGEKTFFGHPFQLSTLFHIELWERFSFYGMQGILLIYLYYTADKGGLGIDKTLAGGIVGAYSGSVYLSTILGAWFADRVWGAEKTLFLSGIVVMLGHIVLAAAPGLYGLLIGLIFIALGSGGVKSTASSMVGALYEQDEMRPLRDAGFSIFYIAINIGGFLGPLLTGLLQENIGFHYGFGAAAVGMAFGLWRYSLGRKNLPHPTVPHPLSKGQGKTAAAVGIALIAALATAIKTGLVNLDNFSGILLSTVILAVIAYFARLLTNPRVSSDNKRHIIAYIPLFLTICMFWAVWFQIYTVATVYFDETVNRTIGSFTVPVAWKDSMQSLWVILFSGLMAAMWTKMGRKQPKTPLKFAMAVFVTGASFLGFVPFISSGTPMPIAVFALIVLAITIGELMISPIALSISTKIAPPLFKTQMVALNFLAFSLGFTLGGVLFEKGYQAGDEIGFYRLLFYIGAATGFLLLLLVPKLNKMLEGTD

SEQ ID NO: 2646 - protein, 70 aa, Neisseria
MLKQPTRTLGGQRHCVLFGLAPNGVWPAAYCYQMRGAPLPHLFTLTCAAKAAIGGFAFCSTFRRVTAPGR

SEQ ID NO: 2647 - protein, 367 aa, Neisseria
MEAEVINQLNNTLNDLEKRSEDIRVYMDYQGKKDRLEEVIGLSEDPELWNDPKRAQEIGKERKILEGIVLTLDNIASGIEDNRMLIEMTVEENDEEGFAAVQEDVAGLEKQMADLEFKRMFNQPADPNNCFIDITAGAGGTEAEDWAGMLFRMYSRYAERKGFRIEILEEDDGEIAGINRATIRVEGEYAYGLLRTETGVHRLVRYSPFDSNNKRHTSFASVFVYPEIDDSIEIEINPADLRIDTYRASGAGGQHINKTDSAVRITHEPTGIVVQCQNDRSQHANKAAAMEMLKSKLYELEMRKRNEEKQALEEGKSDVGWGSQIRSYVLDSSRIKDLRTGYEVGNTKAVLDGDLDGFIEASLKQGV

SEQ ID NO: 2648 - protein, 297 aa, Neisseria
MVTFSKIRPLLAIAAAALLAACGTAGNNAVRKPVQTAKPAAVVGLALGGGASKGFAHVGIIKVLKENGIPVKVVTGTSAGSIVGSLFASGMSPDRLELEAEILGKTDLVDLTLSTSGFIKGEKLQNYINRKVGGRQIQQFPIKFAAVATDFETGKAVAFNQGNAGQAVRASAAIPNVFQPVIIGRHTYVDGGLSQPVPVSAARRQGANFVIAVDISARPGKNISQGFFSYLDQTLNVMSVSALQNELGQADVVIKPQVLDLGAVGGFDQKKRAIRLGEEAARAALPEIKRKLAAYRY

SEQ ID NO: 2649 - protein, 149 aa, Neisseria
MKIGTTWQTASAMLVLRLFAAYEFLESGLQKWNGENWFSEINDQFPFPFNLLPDALNWNLAMYAELLLPVLLLLGLATRLSALGLMVVTAVAWAAVHAGSGYNVCDNGYKMALIYIVVLIPLLFQGAGGWSLDTLLKKRFCPRCRLKQD

SEQ ID NO: 2650 - protein, 102 aa, Neisseria
MNKNIAAALAGALSLSLAAGAVAANKPASNATGVHKSAHGSCGASKSAEGSCGAAGSKAGEGKCGEGKCGATVKKTHKHTKASKAKAKSAEGKCGEGKCGSK

SEQ ID NO: 2651 - protein, 288 aa, Neisseria
MPSEPGKNMIQHAGLGYRRDLAEDFLSLSENSPICFIEAAPENWLKMGGWARKQFDRVAERLPLALHGLSMSLGGQAPLDTDLIDGIKEMMRRYDCTFFSDHLSYCHDGGHLYDLLPLPFTEEMVHHTARRIREVQDRLGCRIAVENTSYYLHSPLAEMNEVEFLNAVAREADCGIHLDVNNIYVNAVNHGLLSPEAFLENVDAERVCYIHIAGHDVETPELLIDTHGAAVLPTVWDLLELAYAKLPTIPPTLLERDFNFPPFSELEAEVAKIADYQTRAGKECRRAA

SEQ ID NO: 2652 - protein, 248 aa, Neisseria
MQPETSAQYQHRFAQAIRGGEAADGLPQDRLNVYIRLIRNNIYSFIDRCYTETLQYFDREEWGRLKEGFVRDACAQTPYFQEIPGEFLQYCQSLPLLDGILALMDFEYTQLLAEVAQIPDIPDIHYSNDSKYTPSPAAFIRQYRYDVTDDLHEAETALLIWRNAEDDVMYQTLDGFDMMLLEIMGFSALSFDTLAQTLVEFMPEDDNWKNILLGKWSGWTEQRIIIPSLSAISENMEDNSPGQNHLSA

SEQ ID NO: 2653 - protein, 195 aa, Neisseria
MPLPDLTDAELIESRKLLLHFARLQLPDHPDLAEDLVQETLLSAYSAGDSFQGRALVNSWLFAILKNKIIDALRQIGRQRKVFTTLDDELLDEAFESHFSQNGHWTQEGQPQHWNTPEKSLNNNEFQKILQSCLYNLPENTARVFTLKEILGFSSDEIQQMCGISTSNYHTIMHRARESLRQCLQIKWFNQENPK

SEQ ID NO: 2654 - protein, 59 aa, Neisseria
MKKCRDIALLLSKHQDRETTPGEKISIYTHLLFCPYCREYKRQLQTIKRSLAKTTRTSK

SEQ ID NO: 2655 - protein, 36 aa, Neisseria
MYKYAKYEGCINLPYLLYLPYFTDGATPPAQPVLSE

SEQ ID NO: 2656 - protein, 140 aa, Neisseria
MRPIFLSFVLFPILITACSTPDKSARWENIGTISNGNIHTYINKDSVRKNGNLMIFQDKKVVTNLKQERFANTPAYKTAIAEWEIHCNNKTYRLSSLQLFDTKNTEISTQNYTASSLRPMSILSGTLTEKQYETVCGKKL

SEQ ID NO: 2657 - protein, 321 aa, Neisseria; identical to SEQ ID NO: 816

SEQ ID NO: 2658 - protein, 86 aa, Neisseria
MRQISLTDYFCKGLYLFDIFEDIVFLGKRLFTVRKFLDFSELLEMVNTQGYFLEFLYLYSGLNLNQYGVASPCRTICTVCGFVALS

SEQ ID NO: 2659 - protein, 189 aa, Neisseria
MLFPRIIAASAQRKLSVYLKKGGLVAYPTESCYGLGCLPTLAKALGKLAHLKKRPQHKGMIVIGNQFEQLQPLLQMPSENLQDMLRKEWPAPKTFLLSAKSCVLPELRGKQRSKLAVRVPAHVGARRLCQALQTPLVSTSCNRAGKRACRTEREVRRQFGRDVWIVGGRIGRQKSPSQIIDGETGKRLR

SEQ ID NO: 2660 - protein, 423 aa, Neisseria
MKLLVIGNGGREHALAWKLAQSPKVETVFVAPGNAGTAIEPKLQNIDLTAHQDLIEFCRKENIVFTVVGPEAPLAAGIVDDFRAAGLKIFGPTQYAAQLESSKDFAKAFMAKYNIPTAQYQTFENADAAHDYVNQKGAPIVIKADGLAAGKGVIVAMTLDEAHAAIDDMLLDNKMGNAGARVVIEDFLQGEEASFIVMVDGNNVLPMATSQDHKRLLDGDKGLNTGGMGAYSPAPVVTPVVYERAMNEIILPTVAGMKAEGHEFTGFLYAGLMIDQSGAPYTIEFNCRFGDPETQPIMSRLNSDLSDLVEAAIDGKLDSVTAEWSPQTAVGVVLAAQNYPETPKKGDIISGLDAANQIGKVFHAGTTANEKGDVLTNGGRVLCVVGLGDNVAQAKAKAYGALEKISFDGMQYRKDIADKAINR

SEQ ID NO: 2661 - protein, 105 aa, Neisseria
MQKRIDEIQSKYREWCHLLPQLEEDIRRWKHVVTLIRDMDNFYTHEYQACHQAIEDGVELDLSTEGEYSIMSEDALWNALGEFHQLAWLYLRSSVDALDKYTQED

SEQ ID NO: 2662 - protein, 203 aa, Neisseria
MITTYKTITSLTQAEFKDKGSRFIAFAYPIRTLADVKKYLDPLKEEHHKARHWCYAYRLGVDGVQFRANDDGEPSGSAGRPILGQIDSVGITDVLVVVVRYFGGTLLGVPGLIHAYKEATAQALAVAEVVEKNIEKTVWLKCEYPFLNEAIRIAKQYQADILERDLQLDCRLTVSLSLVNYEACVAAWKNTRQIEVNTEKPFE

SEQ ID NO: 2663 - protein, 311 aa, Neisseria
MSVLIIVEHDNKQLNPTTLHAVTAAAKLGKVDLLVAGNGASAVVEFAKQVAGVKKVLVADAAHYAEGLAEELAPLVVKLAADYRYVAATATTFGKNLLPRVAALLDVPQISDLTEIVDNTTFVRPIYAGNAFETVQADSEKLVLTFRATVFDAVAAQGGNAEVINVEATPAQNLSRFVNRQLSHSDRPELTQAKVIVSGGRALGSAEKFNEVLTPLADVLGAAIGASRAAVDAEYAPNDAQVGQTGKVVAPQLYFAIGISGAIQHVAGMQDSKVIVAINKDADAPIFNVADYGLVGDLFEIVPQLTEVLKN

SEQ ID NO: 2664 - protein, 249 aa, Neisseria
MKALVAVKRVVDYNVKVRVKADGSDVDIGNVKMSMNPFDEIAVEEAVRLKEAGKVSEIVAVSLGEKKCEETLRTALAMGADRAIHVETDTKLESLAVAKLLKAVADKENPQIFFLGKQAIDDDANQVAQMLAALLNAAQGTFASKVQIEGDEVQIVREIDGGEETIALKLPAVISADLRLNEPRFVKLPNIMAAKKKPLEKLTPDDLVADISPRLKTVKFAEPKARQAGVKVASVAELVEKLKNEAKVI

SEQ ID NO: 2665 - protein, 322 aa, Neisseria
MKILLVRLSSMGDLIHTLPAIEDLARQCPDVELHWLCEAGFADIARLHPFVKKIHVMKWRQWRKHLFRAETWREMGHLKQTLRQEVFDFVLDSQGLIKSACFAKMAKSPICGLDKNSAREGWAALAYVKTYAVPKGKNAVWRNRELFAQVFGYVMPETQVFGLTVPEAGRLKNLAQPYYAALHATSRDSKLWPVENWRSLLQKLNEEQQCNIYLPWGNEDEKTRAKQIADGLPFAIVCDKINLLQAAYLLKYAVGIVGVDTGLLHLANALEKPVVGIYTDTDPIKTGVQVSPIAKNLGNIGQIPTADLVYQALMDCVAADKG

SEQ ID NO: 2666 - protein, 211 aa, Neisseria
MIVSIDVDAQKTFTPLCPDELPVNEGHLIVEELNAQAALADLRVMTKDAHHMVAKWLVDNPVDMLKPTGLPDADLTWVAHAMVGTRGYELLDGLPSAKEYDYCVWKGVDPELHPYGACFHDIEEKLSTGLIEWLRCQNTDTVIIGGLATDYCVKTTVLQLLKGGRWQVVVNEAACRGIAPETIETAWQEMHSAGAIILKNADEINKYINNQ

SEQ ID NO: 2667 - protein, 226 aa, Neisseria
MTYTITPIGTARSPYKQKFGIARQPGLVSAAKACIELNPKFTADSVRGLEDFDYVWISFIFHGVLDEGWAQMVRPPRLGGKQKMGVFATRSPHRPNHLGLSLLKLERIETGKPVRLYCSGADLLDGTPIVDIKPYIPFVESKPDAASGFVSGKPVELEVVWQENIGAENLSANTKNLISQSIAQDPRPAYQNIPERIYVMNIADYEVRFQIEENRATVIDLSPTPL

SEQ ID NO: 2668 - protein, 334 aa, Neisseria
MSIKVAINGFGRIGRLALRQIEKAHDIEVVAVNDLTPAEMLLHLFKYDSTQGRFQGTAELKDDAIVVNGKEIKVFANPNPEELPWGELGVDVILECTGFFTNKTKAEAHIRAGARKVVISAPGGNDVKTVVYGVNQDILDGSETVISAASCTTNCLAPMAAVLQKEFGVVEGLMTTIHAYTGDQNTLDAPHRKGDLRRARAAALNIVPNSTGAAKAIGLVIPELNGKLDGSAQRVPVASGSLTELVSILERPVTKEEINAAMKAAASESYGYNEDQIVSSDVVGIEYGSLFDATQTRVMTVGGKQLVKTVAWYDNEMSYTCQLVRTLEYFAGKI

SEQ ID NO: 2669 - protein, 864 aa, Neisseria
MSKSAVSPMMQQYLGIKAQHTDKLVFYRMGDFYEMFFDDAVEAAKLLDITLTTRGQVDGEPVKMAGVPFHAAEQYLARLVKLGKSVAICEQVGEVGAGKGPVERKVVRIVTPGTLTDSALLEDKETNRIVAVSPDKKYIGLAWASLQSGEFKTKLTTVDKLDDELARLQAAEILLPDSKNAPQLQTASGVTRLNAWQFAADAGEKLLTEYFGCQDLRGFGLDGKEHAVAIGAAGALLNYIRLTQNLMPQHLDGLSLETDSQYIGMDAATRRNLEITQTLSGKKSPTLMSTLDLCATHMGSRLLALWLHHPLRNRAHIRARQEAVAALESQYKPLQCRLKSIADIERIAARIAVGNARPRDLAALRDSLFALSEIELSAECSSLLGTLKAVFPENLSTAEQLRQAILPEPSVWLKDGNVINHGFHPELDELRRIQNHGDEFLLDLEAKERERTGLSTLKVEFNRVHGFYIELSKTQAEQAPADYQRRQTLKNAERFITPELKAFEDKVLTAQEQALALEKQLFDGVLKNLQTALPQLQKAAKAAAALDVLSTFSALAKERNFVRPEFADYPVIHIENGRHPVVEQQVRHFTANHTDLDHKHRLMLLTGPNMGGKSTYMRQVALIVLLAHTGCFVPADAATIGPIDQIFTRIGASDDLASNRSTFMVEMSETAYILHHATEQSLVLMDEVGRGTSTFDGLALAHAVAEHLLQKNKSFSLFATHYFELTYLPEAHTAAVNMHLSALEQGQDIVFLHQIQPGPAGKSYGIAVAKLAGLPVRALKSAQKHLNGLENQAAANRPQLDIFSTMPSEKGDEPNVGNFVDKAEEKHFEGILAAALEKLDPDSLTPREALSELYRLKDLCKSVS

SEQ ID NO: 2670 - protein, 131 aa, Neisseria
MLPQGKAARRVSANEVSGRACARMVLVICQTLPKRDTLNGSGTHTLPVWAILPRSLRSKSTIITFSARFFGSVCNSAARRSSCPSPKIGAVPFIGSVLMVPSEAMLRKSSGEKHSVHADCPASSGRWDNTA

SEQ ID NO: 2671 - protein, 131 aa, Neisseria
  VARIANT (1)...(131): Xaa = Any Amino Acid
MLPQGKAARRMSANEVCGXLXAWXVLVICQTLPKRDTLNGSGTHTVPVWAILPRSLRSKSTIITFSARFFGSACNSAARRSSCPSPKIGAVPFIGSVLMVPSEPILRKSSGEKHSVHADCPSASGRWDKTA

SEQ ID NO: 2672 - protein, 131 aa, Neisseria
MLPQGKAARRMSANEVCGKAWAWMVLVICQTLPKRDTLNGSGTHTVPVWAILPRSLRSKSTIITFSARFFGSACNSAARRSSCPSPKIGAVPFIGSVLMVPSEPILRKSSGEKHSVHADCPCASGRWDKTA

SEQ ID NO: 2673 - protein, 219 aa, Neisseria
MVVFVAEGVFGRAVLGHLVLLFGQGAFEFGVTRFFIRCRVEAFALRCGFGFARQRFVGFADVDVAVAVGVFNQVVLMVFLGVVEVFQRFVFNNEGQLVFLLLAFEGGGDDGFFGGVGVVHAAAVLRAGVVTLFVEAGRINDAEIILQDVVQAEFVGIVGHFDGLGMTRMAVGHFFVRVFRVAVGVTGYRVNHAVDALEIGFQAPKAAAGEVNGARVHDC

SEQ ID NO: 2674 - protein, 219 aa, Neisseria
  VARIANT (1)...(219): Xaa = Any Amino Acid
MVVFVAEGIFGRAVLGNLXLLFGQGAFEFGVTRFFIRCRVEAFALRGGLGFARQRFVSXADVDVAVAVGVFNQVVLMVFLGIVEVFQRLVFNNEGQLVFLLLAFEGXGDDGFFXGVGVVHAAAVLRTGVVALFVEAGRINDAEEILQDVVAEFVGIVGHFDGFGVARMAVGHVFIARIFRVAVGVAGYRVNHAVDALEIGFQAPEAAXGEVNGARVHDF

SEQ ID NO: 2675 - protein, 219 aa, Neisseria
MVVFVAEGIFGRAVLGNLVLLFGQGAFEFGVTRFFIRCRVEAFALRCGLGFARQRFVGFADIDVAVAVGVFNQVVLMVFLGIVEVFQRLVFNNEGQLVFLLLAFEGGGDDGFFGGVGVVHAAAVLRTGVVALFVEAGRINDAEEILQDVVAEFVGIVGHFDGFGVARMAVGHVFIARIFRVAVGVAGYRVNHAVDALEIGFQAPEAAAGEVDGARVHDF

SEQ ID NO: 2676 - protein, 258 aa, Neisseria
MVERHIQHLRNGHLHLMRPCQQVSQMFGGRAYDFRADKAAGGFFGIQAHMAFVYQHHAAATLIFERYFADDKFVGLVLRGNLRVFQTDKADLRTGKHHANGAAAQTAADIRVAAPRYCPAILPWSAASCSRGSWLDASPAIKICGMLVCMVSGSATGTPRASLSILMFSKPILSTFGRRPTAANIYSATNTPFSPSCSQWTSTLPSASSLTSVLASRCSFNSSPNTAFASSETTGSEMPPMIPPKPKISTFTPKRCNA

SEQ ID NO: 2677 - protein, 257 aa, Neisseria
MVERHIQHLRNGHLHLMCPSQQVRQMFGGRAYDFRADKAAGGFFGIQAHMAFVHQHHAAAALVFERYFADDKFVGLVLRGNLRVFQTDKADLRTGKHHADGAAPQTAADIRVAAALSPAILPWSAASCSRGSWLDASPAMKICGILVCMVSGSATGTPRASFSILIFSKPILSTFGRRPTAASIYSATNTPFSPSCSQWTSTLPSASSLTSVLASRCSFNSSPNTAFASSETTGSEMPPMIPPKPKISTFTPKRCNA

SEQ ID NO: 2678 - protein, 257 aa, Neisseria
MVERHIQHLRNGHLHLMCPSQQVRQMFGGRTYDFCADEAAGGFFGIQAHMAFVYQHHAAAALVFERYFADDKFVGLVLRGNLRVFQTDKADLRTGEHYADGAAAQTAADIRVAAALSPAILPWSAASCSRGSWLDASPAIKICGILVCIVSGSATGTPRASFSILMFSKPILSTFGRRPTAASIYSATNTPFSPSCSQWTSTLPSASSLASVLASKCSFNSSPNTAFASSETTGSEMPPMMPPKPKISTFTPKRCNA

SEQ ID NO: 2679 - protein, 368 aa, Neisseria
MGMDNIDMFMPEQEEIQSMWKEILLNYGIFLLELLTVFGAIALIVLAIVQSKKQSESGSVVLTDFSENYKKQRQSFETFFLSEEETKHQEKKEKKKEKAEAKAEKKRLKEGGEKSAETQKSRLFVLDFDGDLYAHAVESLRHEITAVLLIAKPEDEVLLRLESPGGVVHGYGLAASQLRRLRERNIPLTVAVDKVAASGGYMMACVADKIVSAPFAVIGSVGVVAEVPNIHRLLKKHDIDVDVMTAGEFKRTVTFMGENTEKGKQKFRQELEETHQLFKQFVSENRPGLDIEKIATGEHWFGRQALALNLIDEISTSDDLLLKAFENKQVIEVKYQEKRSLIQRIGLQAEASVEKLFAKLVNRRADVM

SEQ ID NO: 2680 - protein, 366 aa, Neisseria
  VARIANT (1)...(366): Xaa = Any Amino Acid
MDNIDMFMPEQEEIQSMWKEILLNYGIFLLELLTVFGAIALIVLAIVQSKKQSXSGSVVLTDFSENYKKQRQSFEAFFLSGEEAQHQEKEEKKKEKAEAKAEKXRLKEGGEKSAETXKSRLFVLXXXXXXXXXXXXXXXXXXXXXXXXXXXXXXXXXXXXXXXXXXXXXXXXXXXXXXXXXXXXXXXXXXXXXXASGGYMMACVADKIASAPFAIVGSVGVVAEVPNIHRLLKKHDIDVDVMTAGEFKRTVTFMGENTEKGKQKFRQELEETHQLFKQFVSENRPQLDIEEVATGEHWFGRQALALNLIDEISTSDDLLLKAFENKQVIEVKYQEKQSLIQRIGLQAEASVEKLFAKLVNRRADVM

SEQ ID NO: 2681 - protein, 366 aa, Neisseria
MDNIDMFMPEQEEIQSMWKEILLNYGIFLLELLTVFGAIALIVLAIVQSKKQSESGSVVLTDFSENYKKQRQSFEAFFLSGEEAKHQEKEEKKKEKAEAKAEKKRLKEGGEKSSETQKSRLFVLDFDGDLYAHAVESLRHEITAVLLIAKPEDEVLLRLESPGGVVHGYGLAASQLRRLRERNIPLTVAVDKVAASGGYMMACVADKIVSAPFAIVGSVGVVAEVPNIHRLLKKHDIDVDVMTAGEFKRTVTFMGENTEKGKQKFRQELEETHQLFKQFVSENRPQLDIEEVATGEHWFGRQALALNLIDEISTSDDLLLKAFENKQVIEVKYQEKQSLIQRIGLQAEASVEKLFAKLVNRRADVM

SEQ ID NO: 2682 - protein, 153 aa, Neisseria
MLLVLEFWFGVSAVGILALFLWLLPRFAAISENLYFRLNNSLERDNHFIRKGDERQLYRHYGLVSRLRVLISNREAFGYLCVGAAMGILFGFAFVMMTLKGYGSAGHIYSVGTYLWMFAMSLDDVPRLVEQYSNLKDIGQRIEWSERNIKAGT

SEQ ID NO: 2683 - protein, 153 aa, Neisseria
MLLVLEFWVGVSAVGILALFLWLLPRFAAISENLYFRLNNSLERDNHFIRKGDRRQLYRHYGLLARLRVLISNREAFGYLCVGTAMGILFGFAFVMMTLKGYSSAGHVYSVGTYLWMFAMSLDDVPRLVEQYSNLKDIGQRIEWSERNIKAGT

SEQ ID NO: 2684 - protein, 153 aa, Neisseria
MLLVLEFWVGVSAVGILALFLWLLPRFAAISENLYFRLKNSLERDNHFIRKGDERQLDRHYGLLARLRVLISNREAFGYLCVGTAMGILFGFAFVMMTLKGYSSAGHVYSVGTYLWMFAISLDDVPRLVEQYSNLKDIGQRIEWSKRNIKAGT

SEQ ID NO: 2685 - protein, 288 aa, Neisseria
MWKMLKHIAKTHRKRLIGTFSPVGLENLLMLGYPVFGGWAINAVIAGRVWQALLYALVVFLMWLVGAARRIADTRTFTRIYTEIAVPVVLEQRQRQVPHSAVTARVALSREFVSFFEEHLPIAATSVVSIFGACIMLLVLEFWVGVSAVGILALFLWLLPRFAAISENLYFRLNNSLERDNHFIRKGDERQLYRHYGLVSRLRVLISNREAFGYLCVGAAMGILFGFAFVMMTLKGYGSAGHIYSVGTYLWMFAMSLDDVPRLVEQYSNLKDIGQRIEWSERNIKAGT

SEQ ID NO: 2686 - protein, 288 aa, Neisseria; identical to SEQ ID NO: 2121

SEQ ID NO: 2687 - protein, 280 aa, Neisseria
SQNHRKRLIGTFFLVGLENLLMLVYPVFGGWAINAVIAGQAWQALLYALVVLLMWLVGAARRIADTRTFTRIYTEIAVPVVLEQRQRQVPHSAVTARVALSREFVSFFEEHLPIAATSVVSIFGACIMLLVLEFWVGVSAVGILALFLWLLPRFAAISENLYFRLKNSLERDNHFIRKGDERQLDRHYGLLARLRVLISNREAFGYLCVGTAMGILFGFAFVMMTLKGYSSAGHVYSVGTYLWMFAISLDDVPRLVEQYSNLKDIGQRIEWSKRNIKAGT

SEQ ID NO: 2688 - protein, 113 aa, Neisseria
MNTTRLPTAFILCCLCAAASAADNSIMTKGQKVYESNCIACHGKKGEGRGTAFPPLFRSDCIMNKPHVLLHSMVKGIDGTFKVERQNLRRIYARNRHQRCGHCRRRHLYHERL

SEQ ID NO: 2689 - protein, 113 aa, Neisseria
  VARIANT (1)...(113): Xaa = Any Amino Acid
MNTTRLPTALVLGCFCAAASAADNSIMTKGQKVYESNCVACHGKKGEGRGTMFPPLYRSDFIMKKPQVLLHSMVKGINGTIKVXRQNLQRIHARNRHQRCGHCRRRHLYHERL

SEQ ID NO: 2690 - protein, 133 aa, Neisseria
MNTTRLPTAFILCCLCAAASAADNSIMTKGQKVYESNCIACHGKKGEGRGTAFPPLFRSDYIMNKPHVLLHSMVKGINGTIKVNGKTYNGFMPATAISDADIAAVATYIMNAFDNGGGSVTEKDVKQAKGKKN

SEQ ID NO: 2691 - protein, 133 aa, Neisseria
MNTTRLPTALVLGCFCAAASAADNSIMTKGQKVYESNCVACHGKKGEGRGTMFPPLYRSDFIMKKPQVLLHSMVKGINGTIKVNGKTYNGFMPATAISDADIAAVATYIMNAFDNGGGSVTEKDVKQAKSKKN

SEQ ID NO: 2692 - protein, 132 aa, Neisseria
MNTTRLPTALVLGCLCAAASAADNSIMTKGQKVYESNCVACHGKKGEGRGTMFPPLYRSDFIMKKPQVLLHSMVKGINGTIKVNGKTYNGFMPATAISDADIAAVATYIMNAFDNGGGSVTEKDVKQAKNKK

SEQ ID NO: 2693 - protein, 164 aa, Neisseria
MNNRHFAVIALGSNLDNPAQQIRGALDALSSHPDIRLEQVSSLYMTAPVGYDNQPDFINAVCTVSTTLDGIALLAELNRIEADFGRERSFRNAPRTLDLDIIDFDGISSDDPRLTLPHPRAHERSFVIRPLAEILPDFILGKYGKVVELSKRLGNQGIRLLPDR

SEQ ID NO: 2694 - protein, 164 aa, Neisseria
  VARIANT (1)...(164): Xaa = Any Amino Acid
MNNRHFAVIALGSNLENPAQQVRAALDTLSSHPDIRLKQASSLYMTAPVGYDNQPDFVNAVCTVSTTLDGIALLAELNRIEADFGRERSFRNAPRTLXLDIIDFDGISSDDTRLTLPHPRAHERSFVIRPLAEILPDFVLGKHGKVAELSKRLGNQGIRLLPDR

SEQ ID NO: 2695 - protein, 164 aa, Neisseria
MNNRHFAVIALGSNLENPAQQVRAALDTLSSHPDIRLKQASSLYMTAPVGYDNQPDFVNAVCTVSTTLDGIALLAELNRIEADFGRERSFRNAPRTLDLDIIDFDGISSDDPRLTLPHPRAHERSFVIRPLAEILPDFILGKHGKVAELSKRLGNQGIRLLPDK

SEQ ID NO: 2696 - protein, 86 aa, Neisseria
MPRAAVAFERHHHKSKAEQNTHRRADAEIAEGFAVGNQHTQARNQSVMAVQLPLVAFSDKVVVAFQAVVQAEIQVFADGGKTWQKP

SEQ ID NO: 2697 - protein, 86 aa, Neisseria
MPRAAVAFERHHHKSKAEQNTHRRADAEIAEGFAVGNQHTQARKQSVMAVQLPPVAFSDKVVVAFQAVVQAEIQVFADGGKTWQKP

SEQ ID NO: 2698 - protein, 86 aa, Neisseria
MPRAAVAFERHHHKSKAEQNTHRRADAEIAEGFAVGNQHTQARKQSVMAVQLPLVAFSDKVVVAFQAVLQAEIQVFADGGKTWQKP

SEQ ID NO: 2699 - protein, 415 aa, Neisseria
MGFPVRKFDAVIVGGGGAGLRAALQLSKSGLNCAVLSKVFPTRSHTVAAQGGISASLGNVQEDRWDWHMYDTVKGSDWLGDQDAIEFMCRAAPEAVIELEHMGMPFDRVESGKIYQRPFGGHTAEHGKRAVERACAVADRTGHAMLHTLYQQNVRANTQFFVEWTAQDLIRDENGDVVGVTAMEMETGEVYIFHAKAVMFATGGGGRIYASSTNAYMNTGDGLGICARAGIPLEDMEFWQFHPTGVAGAGVLITEGVRGEGGILLNADGERFMERYAPTVKDLASRDVVSRAMAMEIYEGRGCGKNKDHVLLKIDHIGAEKIMEKLPGIREISIQFAGIDPIKDPIPVVPTTHYMMGGIPTNYHGEVVVPQGDEYEVPVKGLYAAGECACASVHGANRLGTNSLLDLVVFRPTPR

SEQ ID NO: 2700 - protein, 202 aa, Neisseria
  VARIANT (1)...(202): Xaa = Any Amino Acid
XQLSKSGLNCAVLSKVFPTRSHTVAAQGGISASXGNVQEDRWDWHMYDTVKGSDWLGDQDAIEFMCRAAPEAVIELEHMGMPFDRVESGKIYQRPFCAVADRTGHAMLHTLYQQNVRANTQFFVEWTAQDLIRDENGDVVGVTAMEMETGEVYIFHAKAVMFATGGGGRIYASSTNGIPLEDMEFWQFQPTGVAGAGVLITE

SEQ ID NO: 2701 - protein, 587 aa, Neisseria
  VARIANT (1)...(587): Xaa = Any Amino Acid
MGFPVRKFDAVIVGGGGAGLRAXLQLSKSGLNCAVLSKVFPTRSHTVAAQGGISASLGNVQEDRWDWHMYDTVKGSDWLGDQDAIEFMCRAAPEAVIELEHMGMPFDRVESGKIYQRPFGGHTAEHGKRAVERACAVADRTGHAMLHTLYQQNVRANTQFFVEWTAQDLIRDENGDVVGVTAMEMETGEVYIFHAKAVMFATGGGGRIYASSTNAYMNTGDGLGICARAGIPLEDMEFWQFHPTGVAGAGVLITEGVRGEGGILLNADGERFMERYAPTVKDLASRDVVSRAMAMEIYEGRGCGKNKDHVLLKIDHIGAEKIMEKLPGIREISIQFAGIDPIKDPIPVVPTTHYMMGGIPTNYHGEVVVPQGDEYEVPVKGLYAAGECACASVHGANRLGTNSLLDLVVFGKAAGDSMIKFIKEQSDWKPLPANAGELTRQRIERLDNQTDGENVDALRRELQRSVQLHAGVFRTDEILSKGVREVMAIAERVKRTEIKDKSKVWNTARIEALELDNLIEVAKATLVSAEARKESRGAHASDDHPERDDENWMKHTLYHSDANTLSYKPVHTKPLSVEYIKPAKRVY

SEQ ID NO: 2702 - protein, 415 aa, Neisseria; identical to SEQ ID NO: 2699

SEQ ID NO: 2703 - protein, 587 aa, Neisseria; identical to SEQ ID NO: 1520

SEQ ID NO: 2704 - protein, 587 aa, Neisseria; identical to SEQ ID NO: 2701
  VARIANT (1)...(587): Xaa = Any Amino Acid

SEQ ID NO: 2705 - protein, 180 aa, Neisseria
MKTHRKTCSAVCFAFQTASKPAVSIRHPSEDIMSLKTRLTEDMKTAMRAKDQVSLGTIRLINAAVKQFEVDERTEADDAKITAILTKMVKQRKDGAKIYTEAGRQDLADKENAEIDVLHRYLPQMLSAGEIRTAVEAAVAETGAAGMADMGKVMVVLKTRLAGKADMGEVNKILKTVLTA

SEQ ID NO: 2706 - protein, 165 aa, Neisseria
MRTHRKTCSAVCFAFQTASKPAVSIRHPSEDIMSLKIRLTEDMKTAMRAKDQVSLGTIRLINAAVKQFEVDERTEADDAKITAILTKMVKQRKDSAKIYTEAGRQDLADKENAEIEVLHRYLPQMLSAGEIRTEVEAAVAETGAAGMADMGKVMGLLKTRLAGKA

SEQ ID NO: 2707 - protein, 218 aa, Neisseria
MLARRYFFNIQPGAVFTDKLLEQLMRFLQFLPEFLFALFRIFTHKSNRALKFARRHHIHINIMFFQQAVDIRHFRHHTHRTDDRKRSGNNFIRHTRHHIAAACRDLIDGDGQRNIAFAQTPKLRSRQTVTVNHAARTFQSEQNLIFRLGNQKHRRNLMTQGFYGVCIQIAVKIQHKKAGFLRFGRFLPALLQTLFLCFGFRLFLFLFFFFLMFCLFLA

SEQ ID NO: 2708 - protein, 217 aa, Neisseria
  VARIANT (1)...(217): Xaa = Any Amino Acid
MLARCHFLNIQLRAVLADKLLEQLMRFLQFLSEFLFALFRIFTHKSNRALKFARRHHIHINIMFFQQAVDIRYFRHHTHRTDNRKRSGSNFIRHTRHHITAARXXXXXXXXXXXXXXXXXXXXXXXXXXXXXXXXXXXXXXXXXXXXXXXXXXXXXXXXXXXXXXXXXXXXXXQHKKAFXRFGRFLPTLLQTFFLCFGFRLFLFLFLFFLMLCLFPA

SEQ ID NO: 2709 - protein, 218 aa, Neisseria
MLARCHFLNIQLRAVLADKLLEQLMRFLQFLSEFLFALFRIFTHKSNRALKFARRHHIHINIMFFQQAVDIRYFRYNTHRTDNRKRSGNNFIRHTRHHITTARRHLIDGDGQRNIAFAQTPKLRSRQTVTVNHAARTFQSKQNLIFRLGNQKHRRNLMTQGFYGVCIQIAVKIQHKKAGFLRFGRFLPTLLQTLFLCFGFRLFLFLFLFFLMFCLFPA

SEQ ID NO: 2710 - protein, 218 aa, Neisseria
  VARIANT (1)...(218): Xaa = Any Amino Acid
MLARCHFLNIQLRAVLADKLLEQLMRFLQFLSEFLFALFRIFTHKSNRALKFARRHHIHINIMFFQQAVDIRYFRHHTHRTDNRKRSGSNFIRHTRHHITAARRHLIDGDGQRNIAFAQTXKLRSRQTVTVNHAARTFQSEQNLIFRLGNQKHRRNLMTQGFYGVCIQIAVKIQHKKAGFLRFGRFLPTLLQTLFLCFGFRLFLFLFLFFLMFCLFPA

SEQ ID NO: 2711 - protein, 218 aa, Neisseria; identical to SEQ ID NO: 2709

SEQ ID NO: 2712 - protein, 105 aa, Neisseria
MPLTMLCSRTCGLFIIQSDRKSGGNAVPRPSPFLPWQAMQLDSYTFCPFVMMLLSAAEAAAQRQHKMKAVGSRVVFIGVSPNVLKPCFLILPLRGEKFFWPKSGI

SEQ ID NO: 2713 - protein, 101 aa, Neisseria
  VARIANT (1)...(101): Xaa = Any Amino Acid
MPLTMLCSSTCGFFMMKSERXSGGNMVPRPSPFLPWQATQLDSYTFCPFVMMLLSAAEAAAQKQPKTRAVGSRVVFIGVSFMFETLLLILRSGXKIFLPNQ

SEQ ID NO: 2714 - protein, 99 aa, Neisseria
MPLTMLCSSTCGFFMMKSERSGGNMVPRPSPFLPWQATQLDSYTFCPFVMMLLSAAEAAAQRQPKTRAVGSRVVFIGVSLMFETLLLILRSGKIFLPNR

SEQ ID NO: 2715 - protein, 124 aa, Neisseria
MQYLIVKYSHQIFVTITILVFNIRFFLLWKNPEKPLVGFWKALPHLNDTMLLFTGLWLMKITHFSPFNAPWLGTKILLLFAYIALGMVMMRARPRSTKFYTVYLLAMCCIACIVYLAKTKVLPF

SEQ ID NO: 2716 - protein, 94 aa, Neisseria
KIRKALAGFWKALPHLNDTMLLFTGLWLMKITHFSPFNAPWLGTKILLLLAYIALGMMMMRARPRSTKFYTVYLLAMCCVACIVYLAKTKVLPF

SEQ ID NO: 2717 - protein, 124 aa, Neisseria
  VARIANT (1)...(124): Xaa = Any Amino Acid
MQYLIVKYSHQIFVTITILVFNIRVFXLWKNPEKPLAGFWKALPHLNDTMLLFTGLWLMKITHFSPFNAPWLGTKILLLLAYIALGMMMMRARPRSTKFYTVYLLAMCCLTCIVYLAKTKVLPF

SEQ ID NO: 2718 - protein, 103 aa, Neisseria
MQQGQLVGRVARNKDMRNAGLHGQRIGNGYAARVFVDIDVFQTDIVNVRTATYGCQHIFGNKYAFFAILLPMDFYIAVCVEFDLGFSIQMQFQFFSEHGFRLV

SEQ ID NO: 2719 - protein, 103 aa, Neisseria
MQQRQLVGRIACDEDMRNTGLHGQRVGNRYAARIFFDIDIFQTDIVNVRTAAHGCQHIFGNKYAFFAILLPMDFYIAVCIEFDLGFSIQMQFQFFAEHGVRLV

SEQ ID NO: 2720 - protein, 103 aa, Neisseria
MQQGQLVGRVARNKDMRNTGLHSQRIGNGYAARIFFDIDVFQTDIVNVRTAAYGCQHIFGNKYAFFAILLPMDFYIAVCVEFGLGFSIQMQFQFFTEHGFRLV

SEQ ID NO: 2721 - protein, 89 aa, Neisseria
LLAALVLAACSSTNTLPAGKTPADNIETADLSASVPTRPAEPEGKTLADYGGYPSALDAVKQNNDAAAAAYLENAGDSAMAENVRKEWL

SEQ ID NO: 2722 - protein, 524 aa, Neisseria
MYLPSMKHSLPLLAALVLAACSSTNTLPAGKTPADNIETADLSASVPTRPAEPERKTLADYGGYPSALDAVKQKNDAAVAAYLENAGDSAMAENVRNEWLKSLGARRQWTLFAQEYAKLEPAGRAQEVECYADSSRNDYTRAAELVKNTGKLPSGCTKLLEQAAASGLLDGNDAWRRVRGLLAGRQTTDARNLAAALGSPFDGGTQGSREYALLNVIGKEARKSPNAAALLSEMESGLSLEQRSFAWGVLGHYQSQNLNVPAALDYYGKVADRRQLTDDQIEWYARAALRARRWDELASVISHMPEKLQKSPTWLYWLARSRAATGNTQEAEKLYKQAAATGRNFYAVLAGEELGRKIDTRNNVPDAGKNSVRRMAEDGAVKRALVLFQNSQSAGDAKMRRQAQAEWRFATRGFDEDKLLTAAQTAFDHGFYDMAVNSAERTDRKLNYTLRYISPFKDTVIRHAQNVNVDPAWVYGLIRQESRFVIGAQSRVGAQGLMQVMPATAREIAGKIGMDAAQLYTADG

SEQ ID NO: 2723 - protein, 616 aa, Neisseria
  VARIANT (1)...(616): Xaa = Any Amino Acid
MYPPSLKHSLPLLVXLVLAACSXTNTLSADKTPADNIETADLSASVPTXPAEPEXKTXADYGGYPSALDAVKQKNDAAVAAYLENAGDSAMAENVRNEWLKSLGARRQWTLXAXEYAKLEPAXRAQEVECYADSSRNDYTRAAELVKNTGKLPSGCTKLLEQAAASGLLDGNDAWRRVRGLLAGRQTTDARNLAAALGSPFDGGTQGSREYALLNVIGKEARKSPNAAALLSEMESGLSLEQRSFAWGVLGHYQSQNLNVPAALDYXGKVADRRQLTDDQIEWYARAAXXXRXXXXXAXXXXXXXXKXXXXXXXXXXXARSRAATGNTQXAXKLYKQAAAXGXNFYAVLXGEELGRXIDTRNNVPDAGKXSVLRMAEDGAIKRALVLFRNSRTAGDAKMRRXAQAEWRFATRGFDEDKLLTAAQTAFDHGFYDMAVNSAERTDRKLNYTLRYISXXXDTVIRHAQNVNVDPAWVYGLIRQESRFVMGAQSRVGAQGLMQVMPATAREIAGKIGMDAAQLYTADGNIRMGTWYMADTKRRLQNNEVLATAGYNAGPGRARRWQADTPLEGAVYAETIPFSETRDYVKKVMANAAYYASLFGAPHIPLKQRMGIVPAR

SEQ ID NO: 2724 - protein, 113 aa, Neisseria
MVERKLTGAHYGLRDWVMQRATAVIMLIYTVALLVVLFALPKEYPAWQAFFSQAWVKVFTQVSFIAVFLHAWVGIRDLWMDYIKPFGVRLFLQVATIVWLVGCLVYSVKVIWG

SEQ ID NO: 2725 - protein, 113 aa, Neisseria; identical to SEQ ID NO: 1519

SEQ ID NO: 2726 - protein, 113 aa, Neisseria
  VARIANT (1)...(113): Xaa = Any Amino Acid
MVERKLTGAHYGLRDWAMQRATAVIMLIYTVALLVVLFALPKEYSAWQAFFSQTWVKVFTQVSFIAVFLHAWVGIRDLWMDYXKPFGVRLFLQVATIVWLVGCLVYSIKVIWG

SEQ ID NO: 2727 - protein, 337 aa, Neisseria
MLKQTTLLAACTAVAALLGGCATQQPAPVIAGNSGMQTVSSAPVYNPYGATPYNAAPAANDAPYVPPVQTAPVYSPPAYVPPSAPAVSGTYVPSYAPVDINAATHTIVRGDTVYNISKRYHISQDDFRAWNGMTDNTLSIGQIVKVKPAGYAAPKTAAVESRPAVPAAAQTPVKPAAQPPVQSAPQPAAPAAENKAVPAPAPAPQSPAASPSGTRSVGGIVWQRPTQGKVVADFGGGNKGVDIAGNAGQPVLAAADGKVVYAGSGLRGYGNLVIIQHNSSFLTAYGHNQKLLVGEGQQVKRGQQVALMGNTDASRTQLHFEVRQNGKPVNPNSYIAF

SEQ ID NO: 2728 - protein, 509 aa, Neisseria
MAAADKQLGSDRRSVAIIGDGAMTAGQAFEALNCAGDMDVDLLVVLNDNEMSISPNVGALPKYLASNVVRDMHGLLSTVKAQTGKVLDKIPGAMEFAQKVEHKIKTLAEEAEHAKQSLSLFENFGFRYTGPVDGHNVENLVDVLEDLRGRKGPQLLHVITKKGNGYKLAENDPVKYHAVANLPKESAAQMPSEKEPKPAAKPTYTQVFGKWLCDRAAADSRLVAITPAMREGSGLVEFEQRFPDRYFDVGIAEQHAVTFAGGLACEGMKPVVAIYSTFLQRAYDQLVHDIALQNLPVLFAVDRAGIVGADGPTHAGLYDLSFLRCIPNMIVAAPSDENECRLLLSTCYQADAPAAVRYPRGTGTGVPVSDGMETVEIGKGIIRREGEKTAFIAFGSMVAPALAVAGKLNATVADMRFVKPIDEELIVRLARSHDRIVTLEENAEQGGAGSAVLEVLAKHGICKPVLLLGVADTVTGHGDPKKLLDDLGLSAEAVERRVRAWLSDRDAAN

SEQ ID NO: 2729 - protein, 379 aa, Neisseria
MSRLWFFAVKNIIIRLIYLLPKETQMALVSMRQLLDHAAENSYGLPAFNVNNLEQMRAIMEAADQVNAPVIVQASAGARKYAGAPFLRHLILAAVEEFPHIPVVMHQDHGASPDVCQRSIQLGFSSVMMDGSLLEDGKTPSSYEYNVNATRTVVNFSHACGVSVEGEIGVLGNLETGEAGEEDGVGAAGKLSHDQMLTSVEDAVRFVKDTGVDALAIAVGTSHGAYKFTRPPTGDVLRIDRIKEIHQALPNTHIVMHGSSSVPQEWLKVINEYGGNIGETYGVPVEEIVEGIKHGVRKVNIDTDLRLASTGAVRRYLAENPSDFDPRKYLGKTIEAMKQICLDRYLAFGCEGQAGKIKPVSLEKMASRYAKGELNQIVK

SEQ ID NO: 2730 - protein, 257 aa, Neisseria
  VARIANT (1)...(257): Xaa = Any Amino Acid
MSCLWFFAVKNIIIRLIYLLPKETQMALVSMRQLLDHAAEXSYGLPAFNVNNLXQMRAIMEAADQVDAPVIVQASAGARKYAGAPFLRHLILAAVEVFPHIPVVMHQDHGASPDVCQRSIQLGFSSVMMDGSLMEDGKTPSSYEYNVNATRTVVNFSHACGVSVEGEIGVLGNLETGDAGEEDGVGAVGKLSHDQMLTSVEDAVCFVKDTGVDALAIAVGTSHGAYKFTRPPTGDVLRIDRIKEIHQALPNTHIVMH

SEQ ID NO: 2731 - protein, 379 aa, Neisseria
MSRLWFFAAKNIIIRLIYLLPKETQMALVSMRQLLDHAAENSYGLPAFNVNNLEQMRAIMEAADQVNAPVIVQASAGARKYAGAPFLRHLILAAVEEFPHIPVVMHQDHGASPDVCQRSIQLGFSSVMMDGSLMEDGKTPSSYEYNVNATRTVVNFSHACGVSVEGEIGVLGNLETGEAGEEDGVGAVGKLSHDQMLTSVEDAVRFVKDTGVDALAIAVGTSHGAYKFTRPPTGDVLRIDRIKEIHQALPNTHIVMHGSSSVPQEWLKVINEYGGNIGETYGVPVEEIVEGIKHGVRKVNIDTDLRLASTGAVRRYLAENPSDFDPRKYLSKTIEAMKQICLDRYLAFGCEGQAGKIKPVSLEKMANRYAKGELNQIVK

SEQ ID NO: 2732 - protein, 271 aa, Neisseria
MLKPCLVYSACAAALPARTSSSRRCVPSGRCAYQYSSRADATPRRRHSGAVAIRCSSDSSGRFCQTIKAAILPSFSARKTCSDGETSADSNWRCVHADGLQTVSSAASAAQSDGEAGRMFMFVPSVPPVLWQSGRFCCGRRAVRRVPRQLRDSRRRGRARENRRRSAYRVCLRRADGFPVRTHCRCRLKRRTPRGGQCLPPYRLDNRSNGGGSACRTTHKTLRPYARPQRRVCSFAAAAARRRHRAWGCRLKACRTALPNLAPRRCRYAVR

SEQ ID NO: 2733 - protein, 270 aa, Neisseria
  VARIANT (1)...(270): Xaa = Any Amino Acid
MLKPCAVYSACAAVLPARTSSSRRCVSSGRCVNQYSSRADAIPWRRHSGAVAIRCSSDSSGRFCQTIKAAIPXSFSARKTCSDGETSADSNWRCVHADGLQTASSAASSSQSAQTARRMFTGALSVRPVLWQSGRFCCGRRANRRVRHGRQDNRPWLPMRESRRQSAYPVCLRTAELLPARTRCLCRLKRRIPPAAGCLPPARPDNRSNGGSSAYRTMHKTLRPYERPRQGCSFAAAAARRRHRARVRRLRGYQTALPNPELHRCRYAVR

SEQ ID NO: 2734 - protein, 269 aa, Neisseria
MLKPCAVYSACAAVLPARTSSSRRCVSSGRCVNQYSSRADAIPWRRHSGAVAIRCSSDSSGRFCQTIKAAIPPSFSARKTCSDGETSADSNWRCVHADGLQTASSAASAAQSATARRMFTGAPSVPPVLWQSRRFCCGRRAARRVPQRRRENRLQPPDGSRRRSAYRVCLRRADGFPARTHCRCRLKRRILPAAGCLPPDRPDNRSNGGGSACRTMHKTLRPYVRPQRQGCSFAAAAARRRHRARVRRLKEYQTALPNLAPRRCRYAVP

SEQ ID NO: 2735 - protein, 228 aa, Neisseria
MLKPCAVYSACAAVLPARTSSSRRCVSSGRCVNQYSSRADAIPWRRHSGAVAIRCSSDSSGRFCQTIKAAIPPSFSARKTCSDGETSADSNWRCVHADGLQTASSAASSSQSAQTARRMFTGALSVRPVLWQSGRFCCGRRANRRVRHGRQDNRPWLPMRESRRQSAYPVCLRTAELLPARTRCLCRLKRRIPPAAGCLPPARPDNRSNGGSSAYRTMHKTLRPYERP

SEQ ID NO: 2736 - protein, 213 aa, Neisseria
MTDFRQDFLKFSLAQNVLKFGEFTTKAGRRSPYFFNAGLFNDGASTLQLAKFYAQSIIESGIRFDMLFGPAYKGIILAAATAMMLAEKGVNVPFAYNRKEAKDRGEGGVLVGAPLKGRVLIIDDVISAGTSVRESIKLIEAEGATPAGVAIALDRMEKGTGKLSAVQEVEKQYGLPVAPIASLNDLFILLQNNPEFGQFLEPVRTYRRQYGVE

SEQ ID NO: 2737 - protein, 213 aa, Neisseria; identical to SEQ ID NO: 2394

SEQ ID NO: 2738 - protein, 213 aa, Neisseria; identical to SEQ ID NO: 2394

SEQ ID NO: 2739 - protein, 163 aa, Neisseria
MPSEPPAASDGIKPTHTEKTSCPPVSVRTAKPASGSKKPSSTSPKASSSAKNAKGCLKPKTIWQARKNLYSTIGPKLFRDVKLVHRIGTHAISKKQMSRDEIADILNGGTTLHDTPPATAAAAPAAAPQVSVPPARQEGLNWTIATLFALIVLIMQLSYLFIL

SEQ ID NO: 2740 - protein, 170 aa, Neisseria
  VARIANT (1)...(170): Xaa = Any Amino Acid
MPSEPPYASDGIKPDTHEEIPCPPVSAPTAKPVSGSKKPNSMSPXXXXXXXXXXXXXXXXXXXXXXXXXXXXXXXXXXXPEAVSDVKLVHRIGTRAIGKKQISRDEIAGILNGGTTQPDIPPATAATPAAAPQVTVPPAAPARQDGFNWTIATLFALIVLIMQLSYLVIL

SEQ ID NO: 2741 - protein, 165 aa, Neisseria
  VARIANT (1)...(165): Xaa = Any Amino Acid
MPSEPPYASDGIKPDTHEEIPCPPVSAPTAKPVSGSKKPNSMSPKASSSAKNAKECLKPKTIWQARKNPYSTIXPEAVSDVKLVHRIGTSAIGKKQISRDEIAGILNGGTTQPDIPPATAATPAAAPQVTVPPAAPARQDGFNWTIATLFALIVLIMQLSYLVIL

SEQ ID NO: 2742 - protein, 436 aa, Neisseria
MNAPDSFVAHFREAAPYIRQMRGTTLVAGIDGRLLEGGTLNKLAADIGLLSQLGIRLVLIHGAYHFLDRLAAAQGRTPHYCRGLRVTDETSLGQAQQFAGTVRSRFEAALCGSVSGFARAPSVPLVSGNFLTARPMGVIDGTDMEYAGVIRKTDTAALRFQLDAGNIVWMPPLGHSYGGKTFNLDMVQAAASVAVSLQAEKLVYLTLSDGISRPDGTLAETLSAQEAQSLAEHAASETRRLISSAVAALEGGVHRVQILNGAADGSLLQELFTRNGIGTSIAKEAFVSIRQAHSGDIPHIAALIRPLEEQGVLLHRSREYLENHISEFSILEHDGDLYGCAALKTFAEADCGEIACLAVSPQAQDGGYGERLLAHIIDKARGIGISRLFALSTNTGEWFAERGFQTASEDELPETRRKDYRSNGRNPHILVRRLHR

SEQ ID NO: 2743 - protein, 412 aa, Neisseria
  VARIANT (1)...(412): Xaa = Any Amino Acid
MSAPDLFVAHFREAVPYIRQMRGKTLVAGIDDRLLEGDTLNKLAADIGLLSQLGIRLVLIHGARHFLDRHAAAQGRTPHYCRGLRVTDETSLEQAQQFAGTVRSRFEAALCGSVSGFARAPSVPLVSGNFLTARPIGVIDGTDMEYAGVIRKTDTAALRFQLDAGNIVWLPPLGHSYSGKTFYLDMLQTAASAAVSLQAEKLVYLTLSDGISRPDGTLAETLSAQEAQSLAEHAGGQTRRLISSAELFTRNGIGTSIAKEAFVSIRQAHXXDIPHIAALIRPLEEQGILLHRXREYLENHISEFSILEHDGNLYGCAALKTFAEADCGEIACLAVSPQXQDGGYGERXLAHIIDKARGIGISRLFALSTNTGEWFAERGFQTASEDELPETRRKDYRSNGRNSHILVRRLHR

SEQ ID NO: 2744 - protein, 436 aa, Neisseria
MIVPDLFVAHFREAAPYIRQMRGKTLVAGIDDRLLEGDTLNKFAADIGLLSQLGIRLVLIHGARHFLDRHAAAQGRTPHYCRGLRVTDETSLEQAQQFAGTVRSRFEAALCGSVSGFARAPSVPLVSGNFLTARPIGVIDGTDMEYAGVIRKTDTAALRFQLDAGNIVWLPPLGHSYSGKTFHLDMLQTAASVAVSLQAEKLVYLTLSDGISRPDGTLAVTLSAQEAQSLAEHAGGETRRLISSAVAALEGGVHRVQILNGAADGSLLQELFTRNGIGTSIAKEAFVSIRQAHSGDIPHIAALIRPLEEQGILLHRSREYLENHISEFSILEHDGNLYGCAALKTFAEADCGEIACLAVSPQAQDGGYGERLLAHIIDKARGIGISRLFALSTNTGEWFAERGFQTASEDELPETRRKDYRSNGRNSHILVRRLHR

SEQ ID NO: 2745 - protein, 154 aa, Neisseria
MSSPKHIGLQGGSNGGLITAAAFVREPQSIGALVCEVPLTDMIRYPLLSAGSSWTDEYGNPQKYEACKRRLGELSPYHNLSDGIDYPPALITTSLSDDRVHPAHALKFYAKLRETSPQSWLYSPDGGGHTGNGTQRESADKLACVLLFLKEFLG

SEQ ID NO: 2746 - protein, 154 aa, Neisseria
ISSPEHIGLQGGSNGGLITAAAFVREPQSIGALVCEVPLTDMIRYPLLSAGSSWTDEYGNPQKYEVCKRRLGELSPYHNLSDGIDYPPALITTSLSDDRVHPAHALKFYAKLRETSAQSWLYSPDGGGHTGNGTQRESADELACVLLFLKEFLG

SEQ ID NO: 2747 - protein, 154 aa, Neisseria
ISSPEHIGLQGGSNGGLITAAAFVREPQSIGALVCEVPLTDMIRYPLLSAGSSWTDEYGNPQKYEVCKRRLGELSPYHNLSDGIDYPPALITTSLSDDRVHPAHALKFYAKLRETSPQSWLYSPDGGGHTGNGTQREAADELACVLLFLKEFLG

SEQ ID NO: 2748 - protein, 671 aa, Neisseria
MKSYPDPYRHFENLDSAETQNFAAEANAETRARFLNNDKARALSDGILNQMQDTRQIPFCQEHRARMYHFHQNAEYPKGVYRMCTAATYRSGYPEWKILFSVADFDELLGDDVYLGGVSHLVEQPNRALLTLNKSGGDTAYTLEVDLEAGELVEGGFHFPAGKNHVSWRDENSVWVCPAWDERQLTESGYPREVWLVERGKSFEESLPAYQIDKGAMMVNAWRYLDPQGSPIDLIEASDGFYTKTYLQVSSEGGAKPLNLPNDCDVVGYLAGHLLLTLRKDWHRANQSYPSGALVAVKLNRGELGAAQLLFAPDETQALESVETTKRFVVASLLENVQGRLKAWRFADSKWQEAELPHLPSGALEMTDQPWGGDVVYLAASDFTTPLTLFALDLNVMELTVMRLQPQQFVSDGIEVRQFWAVSSDGERIPYFHVGKNAAPDTPTLVYAYGGFGIPELPHYLGSVGKYWLEEGNAFVLANIRGGGEFGPRWHQAAQGISKHKSVDDLLAVVRDLSERGMSSPKHIGLQGGSNGGLITAAAFVREPQSIGALVCEVPLTDMIRYPLLSAGSSWTDEYGNPQKYEACKRRLGELSPYHNLSDGIDYPPALITTSLSDDRVHPAHALKFYAKLRETSPQSWLYSPDGGGHTGNGTQRESADKLACVLLFLKEFLG

SEQ ID NO: 2749 - protein, 671 aa, Neisseria; identical to SEQ ID NO: 2397

SEQ ID NO: 2750 - protein, 671 aa, Neisseria
MKSYPDPYRHFENLDSAETQNFAAEANAETRARFLNNDKARALSDGILAQLQDTRQIPFCQEHRARMYHFHQDAEYPKGVYRVCTAATYRSGYPEWKILFSVADFDELLGDDVYLGGVSHLVEQPNRALLTLSKSGGDTAYTLEVDLEAGELVEGGFHFPAGKNHVSWRDENSVWVCPAWDERQLTESGYPREVWLVERGKSFEESLPVYQIAEDGMMVNAWRYLDPQGSPIDLIEASDGFYTKTYLQVSAEGEAKPLNLPNDCDVVGYLAGHLLLTLRKDWHRANQSYPSGALVAVKLNRGELGAAQLLFAPNETQALESVETTKRFVVASLLENVQGRLKAWRFTDGKWQETELPRLPSGALEMTDQPWGGDVVYLAASDFTTPLTLFALDLNVMELTVMRRQPQQFDSDGINVQQFWTTSADGERIPYFHVGKNAAPDMPTLVYAYGGFGIPELPHYLGSIGKYWLEEGNAFVLANIRGGGEFGPRWHQAAQGISKHKSVDDLLAVVSDLSERGISSPEHIGLQGGSNGGLITAAAFVREPQSIGALVCEVPLTDMIRYPLLSAGSSWTDEYGNPQKYEVCKRRLGELSPYHNLSDGIDYPPALITTSLSDDRVHPAHALKFYAKLRETSPQSWLYSPDGGGHTGNGTQREAADELACVLLFLKEFLG

SEQ ID NO: 2751 - protein, 201 aa, Neisseria
MTMICLRFQAFVPHTSALSNTSTAAGPSCPMAAVRSMMKIQPGFFSLMYSKETGCPCPSLRKDSSTGGRPMSPCIQLANRDCVPKADTLLPVTDSTSPRPLPLAASRFWANSASICAFNSATRASLPKIRDRVSICFSPLVRILPLSTVKSMVVAFFANCSYASAPGPPVMTNCGLWRCRDSQSGSNSVPTVAALSNAGCK

SEQ ID NO: 2752 - protein, 201 aa, Neisseria
  VARIANT (1)...(201): Xaa = Any Amino Acid
MTMICLRFQAFVPRTSALSXTSTAAGXSCPMAAVRSMMKIQSGFFSLMYSKETGCPCPSLRKDSSTGGRPMSPCIQLANRDCVPKADTLLPVTDSTSPRPLPLAASRVWANSASICAFNSAARASLPKIRAKVSICFSPLVRILPLSTVRSMVVAFFANCSYASAPGPPVMTSXGLXRCRASXSGSNSVPTVAALSNAGCK

SEQ ID NO: 2753 - protein, 198 aa, Neisseria
MTMICLRFQAFVPRTSALSNTSTAAGPSCPMAAVRSMMKIQSGFFSLMYSKETGCPCPSLRKDSSTGGRPMSPCIQLANRDCVPKADTLLPVTDSTSPRPLPLAASRVWANSASICAFNSAARASLPKIRAKVSICFSPLVRILPLSTVRSMVVAFFANCSYASAPGPPVMTSGLRCRASSGSNSVPTVAALSNAGCK

SEQ ID NO: 2754 - protein, 173 aa, Neisseria
MTMICLRFQAFVPRTSALSNTSTAAGPSCPMAAVRSMMKIQSGFFSLMYSKETGCPCPSLRKDSSTGGRPMSPCIQLANRDCVPKADTLLPVTDSTSPRPLPLAASRVWANSASICAFNSAARASLPKIRAKVSICFSPLVRILPLSTVRSMVVAFFANCSYASAPGPPVMTS

SEQ ID NO: 2755 - protein, 173 aa, Neisseria; identical to SEQ ID NO: 2754

SEQ ID NO: 2756 - protein, 128 aa, Neisseria
MVVSNQNIYAVGPSALFHIRRQKSVMPPERFVEPSRVAVAAKVHRGLDGAARFDEGERVFQPQAAQASGDGFAGLRFEIAFQVAFVQPDAAGDFGDGQRAGEFAVQNIGGFVYAPAAVAVVVAAEGEA

SEQ ID NO: 2757 - protein, 129 aa, Neisseria
MVVSNQNIYAAGPSALLHIRRQKSVMPSERFVEPSRVAVAAKVHGGLDGAAGFDEGERVFQPQAAQASGDGFAGLRFEIAFQVAFVQSDAAGDFGDGQRTGEFVLQDVGGFVYAPTAVTVVVAAEGEAQ

SEQ ID NO: 2758 - protein, 129 aa, Neisseria; identical to SEQ ID NO: 2757

SEQ ID NO: 2759 - protein, 89 aa, Neisseria
MLPDQSVEFLPQVVVFDGLFGGGFPAVALPTVYPVFHAVFDVLRVGADDDGAAAFERFQPFDNGGQLHAVVGGLRFAAEKFFFAAAVAH

SEQ ID NO: 2760 - protein, 89 aa, Neisseria
  VARIANT (1)...(89): Xaa = Any Amino Acid
MPSDXSVEFFPEVVVFDGLFGGGFPAVALPTVYPVFHAIFDVLRVGADDDGAAAFERFQSFDDGSQFHAVVGGLRFAAEKFFFVATVAH

SEQ ID NO: 2761 - protein, 89 aa, Neisseria
VPSDQRVEFFPQVVVFDGLFGGGFPAVALPTVYPVFHAVFDVLRVGADDDGAAAFERFQSFDDGGQFHTVVGGLRFAAEKFFFVAAVAH

SEQ ID NO: 2762 - protein, 186 aa, Neisseria
MSAMLRPTSSPPRRACMMTIRTRSSAKRKTCNAPGQSIRPASCSVTSCSGLMVSVMPNMERLPFSLFSSLGLRYSRYSLERTRAMRPGMLNRSAATLQATMLVSSLRESASSKSASSAPARYNVKGDAPLPKTVWTSRRLPVSCNAFSSMSITVTSLLVMAARFCATVEPTCPLPKMRIFTVWVAG

SEQ ID NO: 2763 - protein, 186 aa, Neisseria
  VARIANT (1)...(186): Xaa = Any Amino Acid
MSAMLRPTSXPXXRACMMTIRTRSSAKRKTCNAPGQSIRPASCSVTSCSGLMVSVMPNMERLPFSLFSSLGLRYSRYSLERTRAMRPGMLNRSAATLQATMLVSSLRESASSKSASSAPARSNVKGDAPLPKTVWTSRRLPVSCNAFSSMSITVTSLLGMAARFCATVEPTCPLPKMRIFTVWVAE

SEQ ID NO: 2764 - protein, 186 aa, Neisseria
MSAMLRPTSSPPRRACMMTIRTRSSAKRKTCNAPGQSIRPASCSVTSCSGLMVSVMPNMERLPFSLFSSLGLRYSRYSLERTRAMRPGMLNRSAATLQATMLVSSLRESASSKSASSAPARSNVKGDAPLPKTVWTSRRLPVSCNAFSSMSITVTSLLGMAARFCATVEPTCPLPKMRIFTVWVAE

SEQ ID NO: 2765 - protein, 309 aa, Neisseria
MVIIQARRGGLLVGRSIADIAQDLPDGADCQICAVYRNNRLIVPAPQTVIIEGDEILFAAAAENIGAVIPELRPKETSTRRIMIAGGGNICYRLAKQLEHAYNVKIIECRPRRAEWIAENLDNTLVLQGSATDETLLDNEYIDEIDVFCALTNDDESNIMSALLAKNLGAKRVIGIVNRSSYVDLLEGNKIDIVVSPHLITIGSILAHIRRGDIVAVHPIRRGTAEAIEVVAHGDKKTSAIIGRRISGIKWPEGCHIAAVVRAGTGETIMGHHTETVIQDGDHIIFFVSRRRILNELEKLIQVKMGFFG

SEQ ID NO: 2766 - protein, 312 aa, Neisseria
  VARIANT (1)...(312): Xaa = Any Amino Acid
MVIIQARXXGXLVGRSIADIAQDLPDGADCQICAVYRNNRLIVPAPQTVIIEGDEILFAAAAENIGAVIPELRPKETQRNQPXXIMIXGGGNIGYRLAKQLEHAYNVKIIECRPRRAEWIAENLDNTLVLQGSATDETLLDNEYIDEIDVFCALTNDDESNIMSALLAKNLGAKRVIGIVNRSSYVDLLEGNKIDIVVSPHLITIGSILAHIRRGDIVAVHPIRRGTAEAIEVVAHGDKKTSAIIGRRISGIKWPEGCHIAAVVRAGTGETIMGHHTETVIQDGDHIIFFVSRRRILNELEKLIQVKMGFFG

SEQ ID NO: 2767 - protein, 309 aa, Neisseria
MVIIQARRGGLLVGRSIADIAQDLPDGADCQICAVYRNNRLIVPAPQTVIIEGDEILFAAAAENIGAVIPELRPKETSTRRIMIAGGGNIGYRLAKQLEHAYNVKIIECRPRRAEWIAENLDNTLVLQGSATDETLLDNEYIDEIDVFCALTNDDESNIMSALLAKNLGAKRVIGIVNRSSYVDLLEGNKIDIVVSPHLITIGSILAHIRRGDIVAVHPIRRGTAEAIEVVAHGDKKTSAIIGRRISGIKWPEGCHIAAVVRAGTGETIMGHHTETVIQDGDHIIFFVSRRRILNELEKLIQVKMGFFG

SEQ ID NO: 2768 - protein, 150 aa, Neisseria
MLDKGEELPVDFTNRLIYYVGPVDPVGDEVVGPAGPTTATRMDKFTRQMLKQTGLLGMIGKSERGAATCEAIADNKAVYLMAVGGAAYLVAKAIKSSKVLAFPELGMEAVYEFEVKDMPVTVAVDSKGESIHATAPRKWQAKIGIIPVES

SEQ ID NO: 2769 - protein, 150 aa, Neisseria
MLNKGEELPVDFTNRLIYYVGPVDPVGDEVVGPAGPTTATRMDKFTRQMLEQTDLLGMIGKSERGVATCEAIADNKAVYLMAVGGAAYLVAKAIKSSKVLAFPELGMEAIYEFEVKDMPVTVAVDSKGESIHATAPRKWQAKIGIIPVES

SEQ ID NO: 2770 - protein, 150 aa, Neisseria
MLDKGEELPVDFTNRLIYYVGPVDPVGDEIVGPAGPTTATRMDKFTRQMLEQTDLLGMIGKSERGAATCEAIADNKAVYLMAVGGAAYLVAKAIKSSKVLAFPELGMEAIYEFEVKDMPVTVAVDSKGESIHATAPPQWQAKIGIIPVKS

SEQ ID NO: 2771 - protein, 139 aa, Neisseria
MRAQAFDQPFGQLLFGQAEHFAPVDGFRVQDIDLDGHQRLFRTAFAVFRNPVCRRTGFCRIGVFPALNLCGFKFGTVFFGIEPDSPPRFDVFFRNRHLQGSLRVEPVFLKDDHRVGFDFLAAIGNGAVVFFLPFLQIRL

SEQ ID NO: 2772 - protein, 139 aa, Neisseria
MRAQAFDQPFGQLLFGQAEHFAPVDGFRVQDIDLDGHQRFFRIVFPVFRNRRLIRAGFCLVGVFPAFNLSGFKFDTVFFGIKPDSPPRFDVFFRNRHLQGSLRVEPVFLKDDHRVGFDFLAAIGNGGIVFLLPFFQIRL

SEQ ID NO: 2773 - protein, 139 aa, Neisseria
MRAQAFDQPFGQLLFGQAEHFAPVDGFRVQNIDLDGHQRFFRTAFAVFRNPVCRRTRFCRIGVFPAFNLSGFKFGTVFFGIKPDSPPRFDVFFRNRHLQGSLRVEPVFLKDDHRVGFDFLAAIGNGGIVFLLPFFQIRL

SEQ ID NO: 2774 - protein, 127 aa, Neisseria
MGAGWCPPGILGIGIGGTPEKAVLMAKESLMSHIDIQELQEKAASGAELSTTEALRLELFEKVNALGIGAQGLGGLTTVLDVKILDYPTHAASKPIAMIPNCAATRHVEFELDGSGPVELTPPRVED

SEQ ID NO: 2775 - protein, 130 aa, Neisseria
  VARIANT (1)...(130): Xaa = Any Amino Acid
MGAGWCPPGILGIGIGGXAEKAVLMAKESLMSHIDIQELQEKAASGAELSTTEALRLELFEKVNALGIGAQGLGGLTTVLDVKILDYPTHAASKPIAMIPNCAATRHVEFELDGSGPVELTPPRVEDGPI

SEQ ID NO: 2776 - protein, 129 aa, Neisseria
MGAGWCPPGILGIGIGGTPEKAVLMAKESLMSHIDIQELQEKAASGAELSTTEALRLELFEKVNALGIGAQGLGGLTTVLDVKILDYPTHAASKPIAMIPNCAATRHVEFELDGSGPVELTPPRVEDWP

SEQ ID NO: 2777 - protein, 506 aa, Neisseria
MTVIKQEDFIQSICDAFQFISYYHPKDYIDALYKAWQKEENPAAKDAMTQILVNSRMCAENNRPICQDTGIATVFLKVGMDVQWDADMSVEKMVNEGVRRAYTWEGNTLRASVLADPAGKRQNTKDNTPAVIHMSIVPGGKVEVTCAAKGGGSENKSKLAMLNPSDNIVDWVLKTIPTMGAGWCPPGILGIGIGGTPEKAVLMAKESLMSHIDIQELQEKAASGAELSTTEALRLELFEKVNALGIGAQGLGGLTTVLDVKILDYPTHAASKPIAMIPNCAATRHVEFELDGSGPVELTPPRVEDPDLTYSPDNGKRVDVDKLTKEEVASWKTGDVLLLNGKILTGRDAAHKRLVNMLDKGEELPVDFTNRLIYYVGPVDPVGDEVVGPAGPTTATRMDKFTRQMLKQTGLLGMIGKSERGAATCEAIADNKAVYLMAVGGAAYLVAKAIKSSKVLAFPELGMEAVYEFEVKDMPVTVAVDSKGESIHATAPRKWQAKIGIIPVES

SEQ ID NO: 2778 - protein, 507 aa, Neisseria; identical to SEQ ID NO: 2148

SEQ ID NO: 2779 - protein, 507 aa, Neisseria
MTVIKQEDFIQSICDAFQFISYYHPKDYIDALYKAWQKEENPAAKDAMTQILVNSRMCAENNRPICQDTGIATVFLKVGMDVQWDADMSVEEMVNEGVRRAYTWEGNTLRASVLADPAGKRQNTKDNTPAVIHMSIVPGDKVEVTCAAKGGGSENKSKLAMLNPSDNIVDWVLKTIPTMGAGWCPPGILGIGIGGTPEKAVLMAKESLMSHIDIQELQEKAASGAELSTTEALRLELFEKVNALGIGAQGLGGLTTVLDVKILDYPTHAASKPIAMIPNCAATRHVEFELDGSGPVELTPPRVEDWPDLTYSPDNGKRVDVDKLTKEEVASWKTGDVLLLNGKILTGRDAAHKRLVDMLDKGEELPVDFTNRLIYYVGPVDPVGDEIVGPAGPTTATRMDKFTRQMLEQTDLLGMIGKSERGAATCEAIADNKAVYLMAVGGAAYLVAKAIKSSKVLAFPELGMEAIYEFEVKDMPVTVAVDSKGESIHATAPPQWQAKIGIIPVKS

SEQ ID NO: 2780 - protein, 119 aa, Neisseria
MALVAEETEISAPCFKGCEPTGDSRLLSTTKSAPMPCANSAKASKSATSPKGLDGVSKNSSLVLALTAAFHSFISVGDTRLTPMPNLVTMLLIKPTVVPNRLRLETTWSPACRKVKNAA

SEQ ID NO: 2781 - protein, 119 aa, Neisseria; identical to SEQ ID NO: 2780

SEQ ID NO: 2782 - protein, 117 aa, Neisseria
MALVAEETEISAPCFKGEPTGDSRLLSTTKSAPMPCANSAKASKSATSPKGLDGVSKNSSLVLALTAAFHSFISVGDTLTSMPNLVTMLLIKPTVVPNRLRLEITWSPACKKVKNAA

SEQ ID NO: 2783 - protein, 128 aa, Neisseria
MCMPYAIRVSDGICRIFPPMPSETRNQRASACFKSSIKSPTYSKPTDRRTSPGRIPAASFSSGCILPCVVVHGLVMVERTSPRLAVREKSSTTFHAAAWSATSKPMTMPPPFCCLRISSACGWSGNPV

SEQ ID NO: 2784 - protein, 128 aa, Neisseria
  VARIANT (1)...(128): Xaa = Any Amino Acid
MCMPYKIRVSDGICCPMPSETRNQRASACFKSSIKSPTYSKPTDRRTNPGRMLAASFSSGCILPCVVVHGWVMVERTSPRLAVREKSSTPSTTFHAASXSATSKPMTMPPPFCCLRISAAXGWSDNPV

SEQ ID NO: 2785 - protein, 130 aa, Neisseria
  VARIANT (1)...(130): Xaa = Any Amino Acid
TCMSYKIRVSDGICGVFPPMPSEXRNQRASACFKSSIKSPTYSKPTDRRTNPGRMLAASFSSGCILPCVVVHGWVMVERTSPRLAVREKSSTPSTTFHAAAWSATSKPMTMPPPFCCLRISSAGWSGNPV

SEQ ID NO: 2786 - protein, 137 aa, Neisseria
MPPYFITLLTMENTKSAAKTPTTIQPASIPSAFAASKAFFAVSGNAAFACAAKASGAAVTTASFAPYLRQVLINFMIFSFTKFLKKCVCGLCEGFRDRLPGLLNLIFFFVESENYKFPAYLFQCRAKSVFIAVIFTG

SEQ ID NO: 2787 - protein, 136 aa, Neisseria
MPSYFITLLTMENTKSAAKMPTTIQPASIPSAFAASKAFFAVSGNVAFACAAKARGAAVTTASFAPYLRQVLINFMIFSFKKCLAVMDGAFFRRPPNIRKSVFQKSEYDKFVLVADFFQTCVNRFFEVVEIIGIGD

SEQ ID NO: 2788 - protein, 136 aa, Neisseria
MPSYFITLLTMEKTKSAAKTPTTIQPASIPSAFAASKAFFAVSGNVAFACAAKARGAAVTTASFAPYLRQVLINFMIFSFKKCLAVMDGAFFRRPPNIRKSVFQKSEYDKFVLVADFFQTCVNRFFEVVEIIGIGD

SEQ ID NO: 2789 - protein, 275 aa, Neisseria
MWDNAEAMERLTRWLLVMMAMLLAASGLVWFYNSNHLPVKQVSLKGNLVYSDKKALGSLAKEYIHGNILRTDINGAQEAYRRYPWIASVMVRRRFPDTVEVVLTERKPVARWGDHALVDGEGNVFEARLDRPGMPVFRGAEGTSAEMLRRYDEFSTVLAKQGLGIKEMTYTARSAWNVVLDNGITVRLGRENEMKRLRLFTEAWQHLLRKNKNRLSYVDMRYKDGFSVPHAPDGLPEKESEEYWEQVWDILRPGVGNGSTQISISYKGRRTMEQQ

SEQ ID NO: 2790 - protein, 242 aa, Neisseria
MWDNAEAMERLTRWLLVMMAMLLAASGLVWFYNSNHLPVKQVSLKGNLVYSDKKTLGSLAKEYIHGNILRTDINGAQEAYRRYPWIASVMVRRRFPDTVEVVLTERKPVARWGDHALVDGEGNVFEARLDRPGMPVFRGAEGTSAEMLRRYDEFSTVLAKQGLGIKEMTYTARSAWIVVLDNGITVRLGRENEMKRLRLFTEAWQHLLRKNKNRLSYVDMRYKDGFSVRYASDGLPEKESEE

SEQ ID NO: 2791 - protein, 242 aa, Neisseria
MWDNAEAMERLTRWLLVMMAMLLAASGLVWFYNSNHLPVKQVSLKGNLVYSDKKALGSLAKEYIHGNILRTDINGAQEAYRRYPWIASVMVRRRFPDTVEVVLTERKPVARWGDHALVDGEGNVFEARLDRPGMPVFRGAEGTSAEMLRRYDEFSTVLAKQGLGIKEMTYTARSAWIVVLDNGITVRLGRENEMKRLRLFTEAWQHLLRKNKNRLSYVDMRYKDGFSVRYAPDGLPEKESEE

SEQ ID NO: 2792 - protein, 452 aa, Neisseria
MKPLDLNFICQALKLPMPSENKPVSRIVTDSRDIREGDVFFALAGGRFDAHDFVGGVLSAGAAAVVVSREDCAALGGALKVDDTLAALQTLAKAWRDNVNPFVFGITGSGGKTTVKEMLAAVLRRRFGDDAVSATAGNFNNHIGLPLTLLKLNEKHRYAVIEMGMNHFGELAVLTQIAKPDAALVNNALRAHVGCGFDGVGDIAKAKSEIYAGLCSDGMALIPQEDANMAVFKTATFNLNTCTFGVDSGDVRAENIVLKPLSCEFDLVCGDERTAVVLPVPGRHNVHNAAAAAALALAAGLSLNDVAEGLQGFSNIKGRLNVKAGIKGATLIDDTYNANPDSMKAAVDVLARMPAPRIFVMGDMGELGEDEAAAMHAEVGAYARDQGIEAAYFVGDNSVEAAEKFGADGLWFAAKDPLIQVLSHDLPERATVLVKGSRFMQMEEVVEALEDK

SEQ ID NO: 2793 - protein, 455 aa, Neisseria
  VARIANT (1)...(455): Xaa = Any Amino Acid
MKPLDLNFICQALKLPMPSESKPVSRIVTDSRDIRAGDVFFALAGERFDAHDFVEDVLAAGAAAVVVSREDCAAMDGALKVDDTLAALQTLAKAWRENVNPFVFGITGSGGKTTVKEMLAAVLRRRFGDDAVLATAGNFNNHIGLPLTLLKLNEKHRYAVIEMGMNHFGELAVLTXIAKPNAALVNNAMRAHVGCGFDGVGDIAKAKSEIYQGLCSDGIALIPQEDANMAVFKTATLNLNTRTFGIDSGDVHAENIVLKPLSCEFDLVCGDERAAVVLPVPGRHNVHNAAAAAALALAAGLSLNDVAEGLKGFSNIKGRLNVKSGIKGATLIDDTYNANPDSMKAAIDVLARMPAPRIFVMGDMGELGELGEDEAAAMHAEVGAYARDQGIEAAYFVGDNSVEAAEKFGADGLWFAAKDPLIQVLRHDLPERATVLVKGSRFMQMEEVVEALEDK

SEQ ID NO: 2794 - protein, 452 aa, Neisseria
MKPLDLNFICQALKLPMPSESKPVSRIVTDSRDIRAGDVFFALAGGRFDAHDFVEDVLAAGAAAVVVSREDCVAMDGALKVDDTLTALQMLAKAWRENVNPFVFGITGSGGKTTVKEMLAAVLRRRFGDNAVLATAGNFNNHIGLPLTLLKLNEKHRYAVIEMGMNHFGELAVLTQIAKPDAALVNNAMRAHVGCGFDGVGDIAKAKSEIYQGLCSDGMALIPQEDANMAVFKTATLNLNTRTFGIDSGDVHAENIVLKPLSCEFDLVCGNECAAVVLPVPGRHNVHNAAAAAALSLAAGLSLNDVAEGLKGFSNIKGRLNVKSGIKGATLIDDTYNANPDSMKAAVDVLARMPAPRIFVMGDMGELGEDEAAAMHAEVGAYARDQGIEAAYFVGDNSVEAAEKFGADGLWFAAKDPLIQVLRHDLPERATVLVKGSRFMQMEEVVEALEDK

SEQ ID NO: 2795 - protein, 247 aa, Neisseria
MWLLKLPAVAETASSPKRRRNTAASISFTVVLPPEPVMPNTNGFTLSRHAFANVCNAASVSSTFNAPPKAAQSSRETTTAAAPADNTPPTKSCASNRPPANAKNTSPSRISRLSVTMRDTGLFSDGIGSLRAWQMKFRSSGFIFAFVNIRAADTSVAADFFIACFAVVKHRLFSHSHSAFFLYVSFFRRIFSRFAFSRIPRRGVVGLSVDKGKVIAFARHIGDIPPKIIAVIGQLVGFDTRPTAESA

SEQ ID NO: 2796 - protein, 247 aa, Neisseria
  VARIANT (1)...(247): Xaa = Any Amino Acid
MXLLKLPAVANTASSPKRRRNTAASISFTVVLPPEPVMPNTNGFTFSRHAFASVCNAASVSSTFNAPSIAAQSSRETTTAAAPAANTSSTKSCASNRSPANAKNTSPARMSRLSVTMRDTGLLSDGIGSLRAWQMKFRSSGFIFTFVNIRAADTSVAADFFIACFAVVKHRLFSHSHSXFFLYVSFFRRIFSRFAFSRIPRRGVVGQSVDKGKVIAFALHIGNIPPKIIAVIGQLVGFDTRPTAESA

SEQ ID NO: 2797 - protein, 247 aa, Neisseria
MWLLKLPAVAKTALSPKRRRNTAANISFTVVLPPEPVIPNTNGFTFSRHAFANICNAVSVSSTFNAPSIATQSSRETTTAAAPAANTSSTKSCASNRPPANAKNTSPARMSRLSVTMRDTGLLSDGIGSLRAWQMKFRSSGFIFTFVNIRAADTSVAADFFIACFAVVKHRLFSHSHSAFFLYVSFFRRIFSRFAFSRIPRRGVVGQSVDKGKVIAFALHIGNIPPKIIAVIGQLVGFDTRPTAESA

SEQ ID NO: 2798 - protein, 231 aa, Neisseria
MKQSARIKNMDQTLKNTLGICALLAFCFGAAIASGYHLEYEYGYRYSAVGALASVVFLLLLARGFPRVSSVVLLIYVGTTALYLPVGWLYGAPSYQIVGSILESNPAEAREFVGNLPGSLYFVQALFFIFGLTVWKYCVSVGVFADVKNYKRRSKIWLTILLTLILSCAVMEKIAGDKDWREPDAGLLLNIFDLYYDLAFRAGTICRQARPHFGSSKKSVNMAYPPTCAQV

SEQ ID NO: 2799 - protein, 231 aa, Neisseria
  VARIANT (1)...(231): Xaa = Any Amino Acid
MKQSARIKXMNQTLLYTLGICALLTFXXXXXXXXXYHPEYEYGYRYSAVGALASVVFLLLLARGFPRVSSVVLLIYVGTTALYLPVGWLYGAPSYQIVGSILESNPAEAREFVGNLPGSLYFVQALFFIFGLTVWKYCVSGGVFADVKNYKRRSKIWLTILLTLILSCAVMDKIASDKDLREPDAGLLLNIFDLYYDLAXRAGTICRQARPHFGSSKKSVNMAYPSCCAQV

SEQ ID NO: 2800 - protein, 231 aa, Neisseria
  VARIANT (1)...(231): Xaa = Any Amino Acid
MKQSARIKNMDQTLKNTLGICALLAFCFGAAIASGYHLEYEYGYRYSAVGALASVVFLLLLARGFPRVSSVVLLIYVGTTALYLPVGWLYGAPSYQIVGSILESNPAEAREFVGNLPGSLYFVQALFFIFGLTVWRYCVSGGVFADVKNYKRRSKIWLTILLTLILSCAVMDKIASDKDLREPDAGLLLNIFDLYYDLASXAGTICRQARPHFGSSKKSVNMAYPSCCAQV

SEQ ID NO: 2801 - protein, 94 aa, Neisseria
MGKGQDFTPLRDALKDKAKGVFLIGVDAPQIRRDLDGCGLNLTDCVTLEEAVQTAYAQAEAGDIVLLSPACASFDMFKGYAHRSEVFIEAFKAL

SEQ ID NO: 2802 - protein, 94 aa, Neisseria
MGKGQDFTPLRDALVGKAKGVFLIGVDAPQIRRDLDGCGLNMTDCATLGEAVQTAYAQAEAGDIVLLSPACASFDMFKGYAHRSEVFIEAFKAL

SEQ ID NO: 2803 - protein, 94 aa, Neisseria
MGKGQDFTPLRDALAGKAKGVFLIGVDAPQIRRDLDGCDLNMTDCATLEEAVQKAYAQAEAGDIVLLSPACASFDMFKGYAHRSEVFIGAFKAL

SEQ ID NO: 2804 - protein, 396 aa, Neisseria
MVVLMTAFGLLMIYSASVYLASKEGGDQFFYLTRQAGFVVAGLIASGFLWFLCRMRTWRRLVPWIFALSGLLLVAVLIAGREINGATRWIPLGPLNFQPTELFKLAVILYLASLFTRREEVLRSMESLGWQSIWRGTANLIMSATNPQARRETLEMYGRFRAIILPIMLVAFGLVLIMVQPDFGSFVVITVITVGMLFLAGLPWKYFFVLVGSVLGGMVLMITAAPYRVQRVVAFLDPWKDPQGAGYQLTHSLMAIGRGEWFGMGLGASLSKRGFLPEAHTDFIFAIIAEEFGFFGMCVLIFCYGWLVVRAFSIGKQSRDLGLTFNAYIASGIGIWIGIQSFFNIGVNIGALPTKGLTLPLMSYGGSSVFFMLISMMLLLRIDYENRQKMRGYRVE

SEQ ID NO: 2805 - protein, 396 aa, Neisseria
  VARIANT (1)...(396): Xaa = Any Amino Acid
MVVLMTAFSLLMIYSASVYLASKEGGDQFFYLTRQAGFVVAGLIASGLLWFLCRMRTWRRLVPWIFALSGLLLVVVLIAGREINGATRWIPLGPLNFQPTELFKLAVILYLASLFTRREEVLRSMESLGWQSIWRGTANLIMSATNPQXRRETLEMYGRXRAIILPIMLVAFGLVLIMVQPDFGSFVVITVIAVGMLFLAGLPWKYFFVLVGSVLGGMVLMITAAPYRVQRVVAFLDPWKDPQGAGYQLTHSLMAIGRGEWFGMGLGASLSKRGFLPEAHTDFIFAIIAEEFGFFGMCVLIFCYGWLVVRAFSIGKQSRDLGLTFNAYIASGIGIWIGXQSFFNIGVNIGALPXKGLTXPXMSXGGSSVFFMLISMMLLXRIDYENRRKMRGYRVE

SEQ ID NO: 2806 - protein, 396 aa, Neisseria
MVVLMTAFSLLMIYSASVYLASKEGGDQFFYLTRQAGFVVAGLIASGLLWFLCRMRTWRRLVPWIFALSGLLLVVVLIAGREINGATRWIPLGPLNFQPTELFKLAVILYLASLFTRREEVLRSMESLGWQSIWRGTANLIMSATNPQARRETLEMYGRFRAIILPIMLVAFGLVLIMVQPDFGSFVVITVIAVGMLFLAGLPWKYFFVLVGSVLGGMVLMITAAPYRVQRVVAFLDPWKDPQGAGYQLTHSLMAIGRGEWFGMGLGASLSKRGFLPEAHTDFIFAIIAEEFGFFGMCVLIFCYGWLVVRAFSIGKQSRDLGLTFNAYIASGIGIWIGIQSFFNIGVNIGALPTKGLTLPLMSYGGSSVFFMLISMMLLLRIDYENRRKMRGYRVE

SEQ ID NO: 2807 - protein, 355 aa, Neisseria
MGGKTFMLMAGGTGGHIFPALAVADSLRVRGHHVIWLGSKDSMEERIVPQYGIRLETLAIKGIRGNGIKRKLMLPFTLYKTVREAQRIIRKHRVECVIGFGGFVTFPGGLAAKLLGVPIVIHEQNAVAGLSNRHLSRWAKRVLYAFPKAFSHEGGLVGNPVRADISNLPVPAERFQGREGRLKILVVGGSLGADVLNKTVPQALALLPEEVRPQMYHQSGRNKLGNLQADYDALGVKAECVEFITDMVSAYRDADLVICRAGALTIAELTAAGLGALLVPYPHAVDDHQTANARFMVQAEAGLLLPQTQLTAEKLAEILGSLNREKCLKWAENARTLALPHSADDVAEAAIACAA

SEQ ID NO: 2808 - protein, 335 aa, Neisseria
  VARIANT (1)...(335): Xaa = Any Amino Acid
MGGKTFMLXXGGTGGHIFPALAVADSLRARGHHVIWLGSKDSMEERIVPQYGIRLETLAIKGVRGNGIKRKLMLPVTLYQTVREAQRIIRKHRVECVIGFGGFVTFPGGLAAKLLXVPIVIHEQNAVAGLSNRHLSRWAKRVLYAFPKAFSHEGGLVGNPVRADISNLPVPAERFQGREGRLKILVVGGSLGADVLNKTVPHALALLPDNARPHMYHQSGRGKLGILQAXXXXXXXXXXXXXXXXXXXXXXAGLGALLVPYPHAVDDHQTANARFMVQAEAGLLLPQTQLTAEKLAEILGGLNREKCLKWAENARTLALPHSADDVAEAAIACAA

SEQ ID NO: 2809 - protein, 355 aa, Neisseria
MGGKTFMLMAGGTGGHIFPALAVADSLRARGHHVIWLGSKDSMEERIVPQYDILLETLAIKGVRGNGIKRKLMLPFTLYQTVREAQQIIRKHRVECVIGFGGFVTFPGGLAAKLLGVPIVIHEQNAVAGLSNRHLSRWAKRVLYAFPKAFSHEGGLVGNPVRADISNLPVPAERFQGREGRLKILVVGGSLGADVLNKTVPQALALLPDNARPQMYHQSGRGKLGSLQADYDALGVQAECVEFITDMVSAYRDADLVICRAGALTIAELTAAGLGALLVPYPHAVDDHQTANARFMVQAEAGLLLPQTQLTAEKLAEILGGLNREKCLKWAENARTLALPHSADDVAEAAIACAA

SEQ ID NO: 2810 - protein, 376 aa, Neisseria
MFLWLAHFSNWLTGLNIFQYTTFRAVMAALTALAFSLMFGPWTIRRLTALKCGQAVRTDGPQTHLVKNGTPTMGGSLILTAITVSTLLWGNWANPYIWILLGVLLATGALGFYDDWRKVVYKDPNGVSAKFKMVWQSSVAVIAGLALFYLAANSANNILIVPFFKQIALPLGVVGFLVLSYLTIVGTSNAVNLTDGLDGLAAFPFVLVAAGLAIFAYVSGHYQFSQYLQLPYVAGANEVAIFCTAMCGACLGFLWFNAYPAQVFMGDVGALALGAALGTVAVIVRQEFVLVIMGGLFVVEAVSVMLHVGWYKKTKKRIFLTAPIHHHYQLRCWKETQVVVRFWIITIVVVLIGLSTLKIRGNYAVRTPFRRHLNAQ

SEQ ID NO: 2811 - protein, 376 aa, Neisseria
  VARIANT (1)...(376): Xaa = Any Amino Acid
MFLWLAHFSNWLTGLNIFQYTTFRAVMAALTALAFSLMFGPWTIRRLTALKCGQAVRTDGPQTHLVKNGTPTMGGSLILTAITVSTLLWGNWANPYIWILLGVLLATGALGFYDDWRKVVYKDPNGVSAKFKMVWQSSVAVIAGLALFYLAANSANNILIVPFFKQIALPLGVVGFLVLSYLTIVGTSNAVNLTDGLDGLATFPVVLVAAGLAIFAYASGHSQFAQYLQLPYVAGANEVVIFCTAMCGACLGFLWFNAYPAQVFMGDVGALALGAALGTVAVIVRQEFVLVIMGGLFVVEAVSVMLQVGWYKKTKKRIFLMAPIHHHYEQKGWKETQVVVRFWIITIVLVLIGLSTLKIRXTYAVXTSFRRHLNAQ

SEQ ID NO: 2812 - protein, 374 aa, Neisseria
MFLWLAHFSNWLTGLNIFQYTTFRAVMAALTALAFSLMFGPWTIRRLTALKCGQAVRTDGPQTHLVKNGTPTMGGSLILTAITVSTLLWGNWANPYIWILLGVLLATGALGFYDDWRKVVYKDPNGVSAKFKMVWQSSVAIIAGLALFYLAANSANNILIVPFFKQIALPLGVVGFLVLSYLTIVGTSNAVNLTDGLDGLATFPVVLVAAGLAIFAYASGHSQFAQYLQLPYVAGANEVVIFCTAMCGACLGFLWFNAYPAQVFMGDVGALALGAALGTVAVIVRQEFVLVIMGGLFVVEAVSVMLQVGWYKKTKKRIFLMAPIHHHYEQKGWKETQVVVRFWIITIVLVLIGLSTLKIRTYAVTPFRRHLNAQ

SEQ ID NO: 2813 - protein, 149 aa, Neisseria
MPPKITKSGFCKPAIAAAVAPTFVPLLSSMNTTPFFSPIFSTRCGKPWKVLTCSSNASRGKPTASHKATAAITLAALCKPCSGMSCVEIKSSLPCFKQPVPRSNQKSASCSKENRFTSRPARFMARQNTSSAFKTCTPSPRKISALVCA

SEQ ID NO: 2814 - protein, 149 aa, Neisseria
  VARIANT (1)...(149): Xaa = Any Amino Acid
MPPKITXSGFCKPAIAAAVAPTFVPLLSSINTTPFFSPIFSTRCGRPWKVLTCSSNASRDKPMASHKATAAMTLAALCXPCNGMSCVTIKSSLPCFRRPVSRSNQKSASCSNENHFTSRPARFIARQNASSAFKTCTPSPRKILALVCA

SEQ ID NO: 2815 - protein, 148 aa, Neisseria
MPPKITKSGFCKPAIAAAVAPTFVPLLSSMNTTPFFSPIFSTRCGRPKVLTCSSNASRGKPTASHKATAAITLVALCKPCSGISCVAIKSSLPCFRRPVSRSNQKSASYSNENHFTSRPARFIARQNASSAFKTCTPSPRKILALVCA

SEQ ID NO: 2816 - protein, 118 aa, Neisseria
  VARIANT (1)...(118): Xaa = Any Amino Acid
MRVVEQIVVAVEMVFGNVHHRRRSRAQAFGVFQLEAGKLPHPHVRLFAFALQFCLQDGRTDIARNDGIQPALDAEIADQAGYRGFAVAAGNRNHLVAAAVHNVRQQLDVAXHAXRRFA

SEQ ID NO: 2817 - protein, 118 aa, Neisseria
  VARIANT (1)...(118): Xaa = Any Amino Acid
MRIVEQVVVAVEMVFGNVQHRRRSRTQAFGVFQLEAGKLQHPHVRLFAFALPFRLQNRRADIARDNGIQPALDTEIADQARYRGFAVAAGNRNYLVVPAVHNVRQQFDVAQHAXRRFA

SEQ ID NO: 2818 - protein, 118 aa, Neisseria
  VARIANT (1)...(118): Xaa = Any Amino Acid
MRVVEQVVVAVEMVFGNVQHCRRSRAQAFGVFQLETGKLQHPHVRLFAFALQFRLQNRRADIARDNGIQPTLDAEIADQARYRGFAVAAGNRNHLVAAAVHNVRQQFDVAQHAXRRFA

SEQ ID NO: 2819 - protein, 459 aa, Neisseria
MTAFAFQTASQSLKRFDKHFRTVRVAFEHIKARAGGAEQHNIACFGLGICRLNGFSQSGAVGHIQAAAVQIAADLRRIDTNQEHAFCLAYQCIAQGREVLPFTHAAQNHEERILQTGNRGGSRADIRAFAVVDKHHAVFLADFFHAVRQALEGFDVFEQCFARQTDGLTQSHGSHDVSGVVQTLQRNVLRDNQIFIALFQAACLAFQPEISFVFQRKPFYLAPGTLHRAAERIVRIQNLHAVATENLGFGMRIVEQVVVAVEMVFGNVQHRRRSRTQAFGVFQLEAGKLQHPHVRLFAFALPFRLQNRRADIARDNGIQPALDTEIADQARYRGFAVAAGNRNYLVVPAVHNVRQQFDVAQHASAVLLERLNIRLPLADAGTESQNIETVVQRIFQTARVKHQPVKHLTDLRHAFRLQLRIIRSNLRAVFAQVGNHGNTRTAESGDEDFFVLKSHFGLS

SEQ ID NO: 2820 - protein, 102 aa, Neisseria
MEIPVPPSPATRIFLFESHFGFVLKQIILGRRRPPLPKPLSDGIASRLITRLQALVIVAAVLVSVLTSLAKPLLSERKVLAHAASIVIHQAQIVLGLGIPLF

SEQ ID NO: 2821 - protein, 102 aa, Neisseria
MEIPVPPSPATRIFLFEKSFWFVLKQIILSRRCPPLPKPLSDGIASCSITRLQALVIVAAVLVSVLTSLAKPFLCKGAVLAHAASFGIHHAQIVLGLGYPLR

SEQ ID NO: 2822 - protein, 96 aa, Neisseria
MEIPVPPSPATRIFLFWKSFWFVLKQIILSRGCLILLKPLSDGIASCSITRFQALVIVAAVLVSVLTSLAKPFLCKGAVLAHAASFGIHHAQIVLG

SEQ ID NO: 2823 - protein, 506 aa, Neisseria
MFFISIRYIFVRKLWCANGQTFKITPLRTKNQPERNIMMKNRVSNIHFVGIGGVGMSGIAEVLHNLGFKVSGSDQARNAATEHLSSLGIQVYPGHTAEHVNGADVVVASTAVKKENPEVVAALERQIPVIPRALMLAELMRFRDGIAIAGTHGKTTTTSLTASILGAAGLDPTFVIGGKLNAAGTNARLGKGEYIVAEADESDASFLHLTPIMSVVTNIDEDHMDTYGHSVEKLHQAFIDFIHRMPFYGKAFLCVDSEHVRAILPKVSKPYATYGLDDTADIYATDIENVGAQMKFTVHVQMKGHEQGSFEVVLNMPGRHNVLNALAAIGVALEVGASVEAIQKGLLGFEGVGRRFQKYGDIKLPNGGTALLVDDYGHHPVEMAATLAAARGAYPEKRLVLAFQPHRYTRTRDLFEDFTKVLNTVDALVLTEVYAAGEEPVAAADSRALARAIRVLGKLEPIYCENVADLPQMLMNVLQDGDVVLNMGAGSINRVPSALLELSKQI

SEQ ID NO: 2824 - protein, 506 aa, Neisseria
MFFISIRYIFVRKLWRANGQPFKITPLRIENPPERNIMMKNRVTNIHFVGIGGVGMSGIAEVLHNLGFKVSGSDQARNAATEHLGSLGIQVYPGHTAEHVNGADVVVTSTAVKKENPEVVAALEQQIPVIPRALMLAELMRFRDGIAIAGTHGKTTTTSLTASILGAAGLDPTFVIGGKLNAAGTNARLGKGEYIVAEADESDASFLHLTPIMSVVTNIDEDHMDTYGHSVEKLHQAFIDFIHRMPFYGKAFLCIDSEHVRAILPKVSKPYATYGLDDTADIYATDIENVGAQMKFTVHVQMKGHEQGSFEVVLNMPGRHNVLNALAAIGVALEVGASVEAIQKGLLGFEGVGRRFQKYGDIKLPNGGTALLVDDYGHHPVEMAATLAAARGAYLEKRLVLAFQPHRYTRTRDLFEDFTKVLNTVDALVLTEVYAAGEEPIAAADSRALARAIRVLGKLEPIYCENVADLPEMLLNVLQDGDIVLNMGAGSINRVPAALLALSKQI

SEQ ID NO: 2825 - protein, 506 aa, Neisseria
MFFISIRYIFVRKLWRANGQPFKITPLRIENPPERNIMMKNRVTNIHFVGIGGVGMSGIAEVLHNLGFKVSGSDQARNAATEHLGSLGIQVYPGHTAEHVNGADVVVTSTAVKKENPEVVAALEQQIPVIPRALMLAELMRFRDGIAIAGTHGKTTTTSLTASILGAAGLDPTFVIGGKLNAAGTNARLGKGEYIVAEADESDASFLHLTPIMSVVTNIDEDHMDTYGHSVEKLHQAFIDFIHRMPFYGKAFLCIDSEHVRAILPKVSKPYATYGLDDTADIYATDIENVGAQMKFTVHVQMKGHEQGSFEVVLNMPGRHNVLNALAAIGVALEVGASVEAIQKGLLGFEGVGRRFQKYGDIKLPNGGTALLVDDYGHHPVEMAATLSAARGAYPEKRLVLAFQPHRYTRTRDLFEDFTKVLNTVDALVLTEVYAAGEEPIAAADSRALARAIRVLGKLEPIYCENVADLPEMLLNVLQDGDIVLNMGAGSINRVPAALLELSKQI

SEQ ID NO: 2826 - protein, 276 aa, Neisseria
MQNFGKVAVLMGGFSSEREISLDSGTAILNALKSKGIDAYAFDPKETPLSELKERGFQTAFNILHGTYGEDGAVQGALELLGIPYTGSGVAASAIGMDKYRCKLIWQALGLPVPEFAVLYDDTDFDAVEEKLGLPMFVKPAAEGSSVGVVKVKEKGRLKSVYEELKHLQGRNHCRTFYRRRRIFLPRPERQRAARHTHHPRNRVLRLRSQVQPRRHHLSMSFGRFDRSRRKPDARTGGSRRTGNRCGRLRARRFPQRYRRQTLSVGNQHPARYDRP

SEQ ID NO: 2827 - protein, 276 aa, Neisseria
  VARIANT (1)...(276): Xaa = Any Amino Acid
MQNFGKVAVLMGGFSSEREISLDSGTAILNALKSKGIDAYAFDPKETPLSELKAQGFQTAFNILHGTYGXDGAVQGALELLGIPYTGSGVAASAIGMDKYRCKLIWQALGLPVPEFAVLHDDTDFDAVEEKLGLPMFVKPAAEGSSVGVVKVKGKGRLKSVYEELKHLQXRNHCRTFYRRRRIFLPRPERQRAARHTHHSRNRVLRLRSQVQPRRHHLSMSFGRFDRSRRKPDARTGGSRRAGNRCGRLRARRFPQRYRRQTLSVGNQHPARYDEP

SEQ ID NO: 2828 - protein, 275 aa, Neisseria
  VARIANT (1)...(275): Xaa = Any Amino Acid
MQNFGKVAVLMGGFSSEREISLDSGTAILNALKSKGIDAYAFDPKETPLSELKAQGFQTAFNILHGTYGEDGAVQGALELLGIPYTGSGVAASAIGMDKYRCKLIWQALGLPVPEFAVLHDDTDFDAVEEKLGLPMFVKPAAEGSSVGVVKVKGKGRLKSVYEELKHFQXRNHCRTVYRRRRIFLPCVERQRPARHTHHPRDRVLLRSQVQPQRHHLSMSFGRSDRSRRKPDARTGGSRRAGNRCGRLRARRFPQRYRRQTLSVGNQHPARYDRP

SEQ ID NO: 2829 - protein, 103 aa, Neisseria
MYSPLPKRALVPAALSLPPITKVGSSPAAPRMEAVRLVVVVLPCVPAMAMPSRKRISSASIKARGITGICRSNAATTSGFSFLTAVEATTTSAPLTCSAVWPG

SEQ ID NO: 2830 - protein, 103 aa, Neisseria
MYSPLPKRALVPAALSLPPITKVGSSPAAPRMEAVRLVVVVLPCVPAMAMPSRKRINSANIRARGITGICCSNAATTSGFSFLTAVEVTTTSAPLTCSAVWPG

SEQ ID NO: 2831 - protein, 103 aa, Neisseria; identical to SEQ ID NO: 2830

SEQ ID NO: 2832 - protein, 124 aa, Neisseria
MSFHLNMDGEFHLRADVFDVGGVDVGGIVQTVSSIRFAHFGQNRADVFAVNTQKGFAVEGHTVDEIDKRLMQFFDAVPVGIHMVFVDIGNDGHNRGQCRKEASDRRLRQRCIRLCPSGRWCLRR

SEQ ID NO: 2833 - protein, 124 aa, Neisseria
  VARIANT (1)...(124): Xaa = Any Amino Acid
MSFHLNMDGEFHLRADVFDVGGVDVGGIVQTVSSIRFAHFGQNRADVFAVNTQKGFAVEGHTVDEIDKRLMQFFDAVPVGIHMVFVDIGNDGHNRCQCRKDASDRRLRQRCIRLCPSGRXCLRR

SEQ ID NO: 2834 - protein, 124 aa, Neisseria
MSFHLNMDGEFHLRADVFDVGGVDVGGIVQTVSSIRFAHFGQNRADVFAVNTQKGFAVEGHTVDEIDKRLMQLLNTVPVGIHMVFVDIGNDGHNRCQCRKDASDRRLRQRCIRLCPSGRWCLRR

SEQ ID NO: 2835 - protein, 124 aa, Neisseria
MAGHTGQGVDFQQIEFAVGIFEEIDAHAAFRTDCLCAANRQFAHQAFFGFGQIFRRTLINGVVSVVLGFVVVKLGCGDDVYAGQPFAVQDGAGIFAAADKTFGNDFAPEGVSILRKRFSDGLFL

SEQ ID NO: 2836 - protein, 124 aa, Neisseria
  VARIANT (1)...(124): Xaa = Any Amino Acid
MARHTGQGVDFQQIEFAVGIFEEIDAHAAFRTDCLRAANRQFAHQAFFGFGQIFRRTLINGVVAVVLGFVVVKLGCGNDVYAGQPFAVQDGAGIFAAADKTFGNDFAXEGVSILRKRFSDGLFL

SEQ ID NO: 2837 - protein, 124 aa, Neisseria
  VARIANT (1)...(124): Xaa = Any Amino Acid
MAGHTGQGVDFQQIEFAVGIFEEIDAHAAFRTDCLRAANRQFAHQAFFGFGQIFRRTLINGVVAVVLGFVVIKLGRGDDVYAGQAFAVQHRAGIFAAADKPFGNDFAXESVSILRKRFSDGLFL

SEQ ID NO: 2838 - protein, 436 aa, Neisseria
MDISKQTLLDRVFNLKANGTTVRTELMAGLTTFLTMCYIVIVNPLILGETGMDMGAVFVATCIASAIGCFVMGFIGNYPIALAPGMGLNAYFTFAVVKGMGVPWQVALGAVFISGLIFILFSFFKVREMLVNALPMGLKMSIAAGIGLFLALISLKGAGIIVANPATLVGLGDIHQPSALLALFGFVMVVVLGYFRVQGAIIITILTITVIASLMGLNEFHGVVGEVPGIAPTFMQMDFKGLFTVSMVSVIFVFFLVDLFDSTGTLVGVSHRAGLLVDGKLPRLKRALLADSTAIVAGAALGTSSTTPYVESAAGVSAGGRTGLTAVTVGVLMLACLMFSPLAKSVPVFATAPALLYVGTQMLRSARDIDWDDMTEAAPAFLTIVFMPFTYSIADGIAFGFISYAVVKLLCRRTGDVPPMVWVVAVLWALKFWYLG

SEQ ID NO: 2839 - protein, 436 aa, Neisseria
  VARIANT (1)...(436): Xaa = Any Amino Acid
MDTSKQTLLDGIFKLKANGTTVRTELMAGLTTFLTMCYIVIVNPXILGETGMDMGAVFVATCIASAIGCFVMGFVGNYPIALAPGMGLNAYFTFAVVKGMGVPWQVALGAVFISGLIFILFSFFKVREMLVNALPMGLKMSIAAGIGLFLALISLKGAGIIVANPATLVGLGDIHQPSALLALFGFAMVVVLGHFRVQGAIIITILTITVIASLMGLNEFHGIIGEVPSIAPTFMQMDFEGLFTVSMVSVIFVFFLVDLFDSTGTLVGISHRAGLLVDGKLPRLKRALLADSTAIVAGAALGTSSTTPYVESAAGVSAGGRTGLTAVTVGVLMLACLMFSPLAKSVPAFATAPALLYVGTQMLRSARDIDWDDMTEAAPAFLTIVFMPFTYSIADGIAFGFISYAVVKLLCRRTKDVPPMVWIVAVLWALKFWYLG

SEQ ID NO: 2840 - protein, 436 aa, Neisseria
MDTSKQTLLDGIFKLKANGTTVRTELMAGLTTFLTMCYIVIVNPLILGETGMDMGAVFVATCIASAIGCFVMGFVGNYPIALAPGMGLNAYFTFAVVKGMGVPWQVALGAVFISGLIFILFSFFKVREMLVNALPMGLKMSIAAGIGLFLALISLKGAGIIVANPATLVGLGDIHQPSALLALFGFAMVVVLGHFRVQGAIIITILTITVIASLMGLNEFHGIIGEVPSIAPTFMQMDFKGLFTVSMVSVIFVFFLVDLFDSTGTLVGVSHRAGLLVDGKLPRLKRALLADSTAIVAGAALGTSSTTPYVESAAGVSAGGRTGLTAVTVGVLMLACLMFSPLAKSVPAFATAPALLYVGTQMLRSARDIDWDDMTEAAPAFLTIVFMPFTYSIADGIAFGFISYAVVKLLCRRTKDVPPMVWIVAVLWALKFWYLG

SEQ ID NO: 2841 - protein, 125 aa, Neisseria
MTADGLFVAFNFNTFAVVRILIPVQQDAAQAGDQFVGDVARFAVGMAFAFGMNAAEHGHAGTHHVHRMGMCRQAFQNFNHTDRQAAHGFELGFISGQLEFVGQMAVNQQVCDFFKLAFLCQIRMS

SEQ ID NO: 2842 - protein, 125 aa, Neisseria
MTADGLFVAFNLNAFAVVRILIPVQEDAAEAGDQFVGDVARFTFRMAFTFRMNAAQHGYAGTHYVHRMGMCRQAFQNFNHTDRQAAHGFELGFISGQLEFVGQMAVNQQVGDFFKLAFLCQIRMS

SEQ ID NO: 2843 - protein, 125 aa, Neisseria; identical to SEQ ID NO: 2842

SEQ ID NO: 2844 - protein, 639 aa, Neisseria
MLGRASMMRLPDIVGVELTGKRQAGITATDIVLALTEFLRKERVVGAFVEFFGEGARSLSIGDRATISNMTPEFGATAAMFAIDAQTIDYLKLTGRDDAQVKLVETYAKTAGLWAGGLKTAVYPRVLKFDLSSVTRNMAGPSNPHARFATADLAAKGLAKPYEEPSDGQMPDGAVIIAAITSCTNTSNPRNVVAAALLARNANRLGLKRKPWVKSSFAPGSKVAGIYLKEAGLLPEMEKLGFGIVAFACTTCNGMSGALDPKIQQEIIDRDLYATAVLSGNRNFDGRIHPYAKQAFLASPPLVVAYALAGSIRFDIENDVLGVADGREIRLKDIWPTDEEIDAIVAEYVKPQQFRDIYIPMSDTGTAQKAPSPLYDWRPMSTYIRRPPYWEGALAGERTLRGMRPPAILPDNITTDHISPSNAILAGSAAGEYLAKMGLPEEDFNSYATHRGDHLTAQRATFANPKLFNEMVRNEDGSVRQGSLARVEPEGQTMRMWEAIETYMNRKQPLIIIAGADYGQGSSRDWAAKGVRLAGVEAIAAEGFERIHRTNLIGMGVLPLQFKPGTNRHTLQLDGTETYDVVGERTPRCGLTLVIHRKNGETVEVPVTCRPDTAEEALVYEAGGVLQRFAQDFLEGNAA

SEQ ID NO: 2845 - protein, 639 aa, Neisseria
MLGRASMMRLPDIVGVELNGKRQAGITATDIVLALTEFLRKERVVGAFVEFFGEGARSLSIGDRATISNMTPEFGATAAMFAIDEQTIDYLKLTGRDDAQVKLVETYAKTAGLWADALKTAVYPRVLKFDLSSVTRNMAGPSNPHARFATADLAAKGLAKPYEEPSDGQMPDGSVIIAAITSCTNTSNPRNVVAAALLARNANRLGLKRKPWVKSSFAPGSKVAEIYLKEAGLLPEMEKLGFGIVAFACTTCNGMSGALDPKIQKEIIDRDLYATAVLSGNRNFDGRIHPYAKQAFLASPPLVVAYALAGSIRFDIENDVLGVADGKEIRLKDIWPADEEIDAVVAEYVKPQQFRDVYVPMFDTGTAQKAPSPLYDWRPMSTYIRRPPYWEGALAGERTLRGMRPLAILPDNITTDHLSPSNAILAVSAAGEYLAKMGLPEEDFNSYATHRGDHLTAQRATFANPKLFNEMVKNEDGSVRQGSFARVEPEGETMRMWEAIETYMNRKQPLIIIAGADYGQGSSRDWAAKGVRLAGVEAIVAEGFERIHRTNLIGMGVLPLQFKPDTNRHTLQLDGTETYDVVGERTPRCDLTLVIHRKNGETVEVPVTCCLDTAEEVLVYEAGGVLQRFAQDFLEGNAA

SEQ ID NO: 2846 - protein, 639 aa, Neisseria
MLGRASMMRLPDIVGVELNGKRKAGITATDIVLALTEFLRKERVVGAFVEFFGEGARSLSIGDRATISNMTPEFGATAAMFAIDEQTIDYLKLTGRDDAQVKLVETYAKTAGLWADALKTAVYPRVLKFDLSSVTRNMAGPSNPHARFATADLAGKGLAKPYEEPSDGQMPDGAVIIAAITSCTNTSNPRNVVAAALLARNANRLGLQRKPWVKSSFAPGSKVAEIYLKEADLLPEMEKLGFGIVAFACTTCNGMSGALDPKIQKEIIDRDLYATAVLSGNRNFDGRIHPYAKQAFLASPPLVVAYALAGSIRFDIENDVLGVADGKEIRLKDIWPTDEEIDAIVAEYVKPQQFRDVYIPMFDTGTAQKAPSPLYDWRPMSTYIRRPPYWEGALAGERTLSGMRPLAILPDNITTDHLSPSNAILASSAAGEYLAKMGLPEEDFNSYATHRGDHLTAQRATFANPKLFNEMVRNEDGSVRQGSLARVEPEGQTMRMWEAIETYMNRKQPLIIIAGADYGQGSSRDWAAKGVRLAGVEAIVAEGFERIHRTNLIGMGVLPLQFKPGTNRHTLQLDGTETYDVVGERTPRCDLTLVIHRKNGETVEVPITCRLDTAEEVLVYEAGGVLQRFAQDFLEGNAA

SEQ ID NO: 2847 - protein, 414 aa, Neisseria
MSAKTPSLFGGAMIIAGKVIGAGMFPNPTANLGDGLIGSLIVLLYTWFPFSSGALMILEVNTHNPRGASFDTMVKDLLGRGWNIINGIAVALVLYGSTYAYILVGGDLTAKGIGSAVGGKISLTVGQLVFFGILAFCVWASARLVDRFTGVLIGGMVLTFIWATGGLVADAKPSVLFDTQAPVGTGYWIYAATALPVCLASFGFHGNVSSLLKYFKGDAPKVAKSIWAGTLVALVIYVLWQTAIQSNLPRNEFAPVIAAERQLSVLNETLSKFAQTGDMDKILSLFPYMAIATSFLGVTLGLFDNIADIFKWNDSMSGRGTKTVALNFLPPLISWLLLPTGFFTAIGASGLAATVWDQGIIPAMLLYVSPQKIGAGKTYKVYGGLWLMLVFLFGIANIAAQVLSQMELVPVFKG

SEQ ID NO: 2848 - protein, 413 aa, Neisseria; identical to SEQ ID NO: 2547

SEQ ID NO: 2849 - protein, 413 aa, Neisseria
  VARIANT (1)...(413): Xaa = Any Amino Acid
MPTKTPSLFGGAMIIAGTXIGAGMLANPTATSGVWFTGSLAVLLYTWFSMLSSGLMILEVNTHYPHGAXFDTMVKDLLGRSWNIINGIAVAFVLYLLTYAYIFVGGDLTAKGLGSAAGGNVSLTVGQLVFFGILAFCVWASARLVDRFTSVLIGGMVLTFIWATGGLIADAKLPVLFDTQAPTGTNYWIYVATALPVCLASFGFHGNVSSLLKYFKGDAPKVAKSIWTGTLIALVIYVLWQTAIQXNLPRNEFAPVIAAEGQVSVXIETLSKFAQTGNMDKILSLFSYMAIATSFLGVTLGLFDYIADIFKWNDSVSGRTKTAALTFLPPXISCLLFPTGFVTAIGYVGLAATVWTGIIPAMLLYRSRKKFGAGKTYKVYGGLWLMVWVFLFGIXNIAAXVLSQMELVPVFKG

SEQ ID NO: 2850 - protein, 289 aa, Neisseria
MSAETYTQIGWVGLGQMGLPMVTRLLDGGIEVGVYNRSPDKTAPISAKGAKVYGSTAELVRACPVIFLMVSDYAAVCDILNGVRDGLAGKIIVNMSTISPTENLAVKALVEAAGGQFAEAPVSGSVGPATNGTLLILFGGSEAVLNPLQKIFSLVGKKTFHFGDVGKGSGAKLVLNSLLGIFGEAYSEAMLMARQFGIDTDTIVEAIGGSAMDSPMFQTKKSLWANREFPPAFALKHASKDLNLAVKELEQAGNTLPAVETVAASYRKAVEAGYGEQDVSGVYLKLAEH

SEQ ID NO: 2851 - protein, 287 aa, Neisseria
  VARIANT (1)...(287): Xaa = Any Amino Acid
MSANEYAQIGWIGLGQMGLPMVTRLLDGGIEVGVYNRSPDKTAPISAKGAKVYGNTAELVRDYPVIFLMVSDYAAVCDILNGVRDGLAGXIIVNMSTISPTEKLAVKALVEAQRQFAEAPVSGSVGPATNGTLLILFGGSEPFXTRCKKYFPSSAKKPSISAMSAKVRARNSSXTRSWAFSANVQRXXLMARQFGIDTDTIVEAIGDSAMDSPMFQTKKSLWANREFPXXFALKHASKDLNLAVKELEQAGNTLPAVETVAASYRKAVEAGYGTQDVSGVYLKLAEH

SEQ ID NO: 2852 - protein, 289 aa, Neisseria
MSANEYTQIGWIGLGQMGLPMVTRLLDGGIEVGVYNRSPDKTAPISAKGAKVYGNTAELVRDYPVIFLMVSDYAAVCDILNGVRDGLAGKIIVNMSTISPTENLAVKALVEAAGGQFAEAPVSGSVGPATNGTLLILFGGSEAVLNPLQKIFSLVGKKTFHFGDVGKGSGAKLVLNSLLGIFGEAYSEAMLMARQFGIDTDTIVEAIGGSAMDSPMFQTKKSLWANREFPPAFALKHASKDLNLAVKELEQAGNTLPAVETVAASYRKAVEAGYGEQDVSGVYLKLAEH

SEQ ID NO: 2853 - protein, 289 aa, Neisseria; identical to SEQ ID NO: 2850

SEQ ID NO: 2854 - protein, 289 aa, Neisseria
  VARIANT (1)...(289): Xaa = Any Amino Acid
MSANEYAQIGWIGLGQMGLPMVTRLLDGGIEVGVYNRSPDKTAPISAKGAKVYGNTAELVRDYPVIFLMVSDYAAVCDILNGVRDGLAGKIIVNMSTISPTENLAVKALVEAAGGQFAEAPVSGSVGPATNGTLLILFGGSEAVLNPLQKIFSLVGKKTFHFGDVGKGSGAKLVLNSLLGIFGEAYSEXMLMARQFGIDTDTIVEAIGDSAMDSPMFQTKKSLWANREFPPAFALKHASKDLNLAVKELEQAGNTLPAVETVAASYRKAVEAGYGEQDVSGVYLKLAEH

SEQ ID NO: 2855 - protein, 289 aa, Neisseria; identical to SEQ ID NO: 2852

SEQ ID NO: 2856 - protein, 170 aa, Neisseria
MVLTFIWATGGLVADAKPSVLFDTQAPVGTGYWIYAATALPVCLASFGFHGNVSSLLKYFKGDAPKVAKSIWAGTLVALVIYVLWQTAIQSNLPRNEFAPVIAAERQLSVLNETLSKFAQTGDMDKILSLFPYMAIATSFLGVTLGLFDNIAGHLQMERQYVRAAPKPSR

SEQ ID NO: 2857 - protein, 169 aa, Neisseria
  VARIANT (1)...(169): Xaa = Any Amino Acid
MVLTFIWAAGGLIADAKPSVLFDTQAPAGTNYWIYAXTALPVCLASFGFHGNVSSLLKYFKGDAPKVAKSIWTGTLIALVIYVLWQTAIQGNLPRNEFAPVIAAEGQVSVLIETLSKFAQTGNMDKILSLFSYMAIATSFLGVTLGLFDYIAHLQMERQHLRAAPKPPR

SEQ ID NO: 2858 - protein, 258 aa, Neisseria
MVLTFIWATGGLIADAKLPVLFDTQAPTGTNYWIYVATALPVCLASFGFHGNVSSLLKYFKGDAPKVAKSIWTGTLIALVIYVLWQTAIQGNLPRNEFAPVIAAEGQVSVLIETLSKFAQTGNMDKILSLFSYMAIATSFLGVTLGLFDYIADIFKWNDSVSGRTKTAALTFLPPLISCLLFPTGFVTAIGYVGLAATVWTGIIPAMLLYRSRKKFGAGKTYKVYGGLWLMVWVFLFGIVNIAAQVLSQMELVPVFKG

SEQ ID NO: 2859 - protein, 172 aa, Neisseria
MLPGFNRIFKRFAPTLGTAHKTPPFALSRTGRLIRSYRHKRRGFNRKGIEMNKTLSILPAAILLGGCAAGGNTFGSLDGGTGMGGSIVKMTVESQCRAELDRRSEWRLTALAMSAEKQAEWENKICGCATEEAPNQLTGNDVMQMLNQSTRNQALAALTVKTVSACFKRLYR

SEQ ID NO: 2860 - protein, 173 aa, Neisseria
MLPGFNRIFKRFVPTLGTAHKTPPFALSRTGRLIRFYRHKRRGFNRKGIEMNKTLSILPVAILLGGCAAGGGNTFGSLDGGTGMGGSIVKMAVGSQCRAELDKRSEWRLTALAMSAEKQAEWENKICACVAQEAPERMTGNDVMQMLAPSTRNQALAALTAKTVSACFKHLYR

SEQ ID NO: 2861 - protein, 173 aa, Neisseria
MLPGFNRIFKRFVPTLGTAHKTPPFALSRTGRLIRFYRHKRRGFNRKGIEMNKTLSILPVAILLGGCAAGGGNTFGSLDGGTGMGGSIVKMAVESQCRAELNKRSEWRLTALAMSAEKQAEWENKICACVAQEAPNQLTGNDVMQMLDPSTRNQALAALTAKTVSACFKHLYR

SEQ ID NO: 2862 - protein, 122 aa, Neisseria
MYYRRVVGLSDGLGDLAAGIDRRRMLTAFGSGHGNDAQRQNHPIRRHRGVLFRLVNPVFGWALTMLLDNLGLIGCKERSAQLGFVGRVLIPAVGFLILCVAMGAVGMLPGIPPFLEQFKSLG

SEQ ID NO: 2863 - protein, 126 aa, Neisseria
MYYRRVMGLSDGLGDLAAGIERSLGRRRILTAFGSGHGNDAQRQNHPIRRHRGVLFRLVNPVFGWALTMLLDNLGLIGCKERSAQLGFAGRVLIPAVGFLILCVAMGAVGMLPGIPPFLEHFKSLG

SEQ ID NO: 2864 - protein, 126 aa, Neisseria
MYYRRVVGLSDGLGDLAAGIERSLGRRRILTAFGSGHGNDAQRQNHPIRRHRGVLFRLVNPVFGWALTMLLDNLGLIGCKERSAQLGFTGRVLIPVVGFLILCVAMGAVGMLPGIPPFLEHFKSLG

SEQ ID NO: 2865 - protein, 120 aa, Neisseria
MPSETRLPNLIRALIFALGFIFLNACSEQTAQTVTLQGETMGTTYTVKYLSNNRDKLPSPAKIQKRIDDALKEVNRQMSTYQTDSEISRFIQTAGELFAHASITDSAEDCLPNTPISSAL

SEQ ID NO: 2866 - protein, 351 aa, Neisseria
  VARIANT (1)...(351): Xaa = Any Amino Acid
MPSETRLPNFIRVLIFALGFIFLNACSEQTAQTVTLQGETMGTTYXVKYLSNNRDKLPSPAEIXKRIDDALKEXNRXMSTYQPDSEISRFNQHTAGKPLRISSDFAHVTAEAVRLNRLTHGALDVTVGPLVNLWGFGPDKSVTREPSPEQIKQAASYTGIDKIILKQGKDYASLSKTHPKAYLDLSSIAKGFGVDKVAGELEKYGIQNYLVEIGGELHGKGKNARGEPWRIGIEQPNIVQGGNTQIIVPLNNRSLATSGDYRIFHVDKNGKRLSHIINPNNKRPISHNLASISVVADSAMTADGLSTGLFVLGETEALKLAEREKLAVFLIVRDKGGYRTAMSSEFEKLLR

SEQ ID NO: 2867 - protein, 351 aa, Neisseria
MPSETRLPNFIRTLIFALSFIFLNACSEQTAQTVTLQGETMGTTYTVKYLSNNRDKLPSPAEIQKRIDDALKEVNRQMSTYQPDSEISRFNQHTAGKPLRISSDFAHVTAEAVHLNRLTHGALDVTVGPLVNLWGFGPDKSVTREPSPEQIKQAASYTGIDKIILKQGKDYASLSKTHPKAYLDLSSIAKGFGVDKVAGELEKYGIQNYLVEIGGELHGKGKNARGEPWRIGIEQPNIVQGGNTQIIVPLNNRSLATSGDYRIFHVDKSGKRLSHIINPNNKRPISHNLASISVVADSAMTADGLSTGLFVLGETEALKLAEREKLAVFLIVRDKGGYRTAMSSEFEKLLR

SEQ ID NO: 2868 - protein, 351 aa, Neisseria; identical to SEQ ID NO: 225

SEQ ID NO: 2869 - protein, 351 aa, Neisseria; identical to SEQ ID NO: 223

SEQ ID NO: 2870 - protein, 351 aa, Neisseria; identical to SEQ ID NO: 2867

SEQ ID NO: 2871 - protein, 140 aa, Neisseria
MASITSPLHGAQQECSKTFLCPPGGTSMGRSMSVTVGLFCVSINLTISVEYGQSGYFTRAAECKTGCQGISPSCLNERTVCEVTIKWSSSETSTSDMACASRLVNMMSSCEGSGEPPGWLCAIIRLSAYSSNASLTISRM

SEQ ID NO: 2872 - protein, 140 aa, Neisseria
  VARIANT (1)...(140): Xaa = Any Amino Acid
MASITSPLHGAHRECSKTFLCPPGGTSIGRSMSVTVGLFCVSINLTISVEYGXSGYFIRAAACKTECQGINPSCLNEQTLCXVTIKWSSSDTSTSDIACASRLVNMMSSCEXSGEPPGWLCAIIRLSAYSSNASLTISRM

SEQ ID NO: 2873 - protein, 144 aa, Neisseria
MPEASIASITSPLHGAQQECSKTFLCPPGGTSMGRSMSVTVGLFCVSINLTISVEYGSGYFIRAAACKTGCQGISPSCLNERTVCAVTIKWSSSDTSTSDIACASRLVNMMSSCEGSGEPPGWLCAIIRLSAYSSNASLTISRM

SEQ ID NO: 2874 - protein, 668 aa, Neisseria
MVDELDLLPDAVAATLLADIGRYVPDWNLLVSERCNSTVAELVKGVDEVQKLTHFARVDSLATPEERAQQAETMRKMLLAMVTDIRVVLIKLAMRTRTLLFLSNAPDSPEKRAVAKETLDIFAPLANRLGVWQLKWQLEDLGFRHQEPEKYREIALLLDEKRTERLEYIENFLDILRTELKKYNIHFEVAGRPKHIYSIYKKMVKKKLSFDGLFDIRAVRILVDTVPECYTTLGIVHSLWQPIPGEFDDYIANPKGNGYKSLHTVIVGPEDKGVEVQIRTFDMHQFNEFGVAAHWRYKEGGKGDSAYEQKIAWLRQLLDWRENMAESGKEDLAAAFKTELFNDTIYVLTPHGKVLSLPTGATPIDFAYALHSSIGDRCRGAKVEGQIVPLSTPLENGQRVEIITAKEGHPSVNWLYEGWVKSGKAIGKIRAYIRQQNADTVREEGRVQLDKQLAKLTPKPNLQELAENLGYKKPEDLYTAVGQGEISNRAIQKACGTLNEPPPVPVSATTIVKQSKIKKGGKTGVLIDGEDGLMTTLAKCCKPAPPDDIAGFVTRERGISVHRKTCPSFRHLAEHAPEKVLDASWAALQEGQVFAVDIEIRAQDRSGLLRDVSDALARHKLNVTAVQTQSRDLEASMRFTLEVKQVNDLPRVLAGLGDVKGVLSVTRL

SEQ ID NO: 2875 - protein, 491 aa, Neisseria
  VARIANT (1)...(491): Xaa = Any Amino Acid
VKLKKYNVHFEVAGRPKHIYSIYKKMVKKKLSFDGLFDIRAVRILVDTVPECYTTLGIVHSLWQPIPGEFDDYIANPKGNGYKSLHTVIVGPEDKGVEVQIRTFDMHQFNEFGVAAHWRYKEGGKGDSAYEQKIAWLRQLLDWRENMAESGKEDLAAAFKTELFNDTIYVLTPHGKVLSLPTGATPIDFAYALHSSIGDRCRGAKVEGQIVPLSTPLENGQRVEIITAKEGHPSVNWLYEGWVKSNKAIGKIRAYIRQQNADTVREEGRVQLDKQLAKLTPKPNLQELAENLGYKKPEDLYTAVGQGEISNRAIQKACGTLNEPPPVPVSETTIVKQSKIKKGGKNGVLIDGEDGLMTTLAKCCKPAPPDDIIGFVTRERGISVHRKXXXSFQHLAEHAPXKVLDASWAALQEGQVFAVDIEIRAQDRSGLLRDVSDALARHKLNVTAVQTQSRDLEASMRFTLEVKQVNDLPRVLASLGDVKGVLSVTRL

SEQ ID NO: 2876 - protein, 668 aa, Neisseria
MVHELDLLPDAVAATLLADIGRYVPDWNLLVSERCNSTVAELVKGVDEVQKLTHFARVDSLATPEERAQQAETMRKMLLAMVTDIRVVLIKLAMRTRTLQFLSNAPDSPEKRAVAKETLDIFAPLANRLGVWQLKWQLEDLGFRHQEPEKYREIALLLDEKRTERLEYIENFLNILRTELKKYNIHFEVAGRPKHIYSIYKKMVKKKLSFDGLFDIRAVRILVDTVPECYTTLGIVHSLWQPIPGEFDDYIANPKGNGYKSLHTVIVGPEDKGVEVQIRTFDMHQFNEFGVAAHWRYKEGGKGDSAYEQKIAWLRQLLDWRENMAESGKEDLAAAFKTELFNDTIYVLTPHGKVLSLPTGATPIDFAYALHSSIGDRCRGAKVEGQIVPLSTPLENGQRVEIITAKEGHPSVNWLYEGWVKSNKAIGKIRAYIRQQNADTVREEGRVQLDKQLAKLTPKPNLQELAENLGYKKPEDLYTAVGQGEISNRAIQKACGTLNEPPPVPVSETTIVKQSKIKKGGKNGVLIDGEDGLMTTLAKCCKPAPPDDIVGFVTRDRGISVHRKTCPSFRHLAEHAPEKVLDASWAALQEGQVFAVDIEIRAQDRSGLLRDVSDALARHKLNVTAVQTQSRDLEASMRFTLEVKQVTDLPRVLASLGDVKGVLSVTRL

SEQ ID NO: 2877 - protein, 737 aa, Neisseria
MTAISPIQDTQSATLQELREWFDSYCAALPDNDKNLIGTAWSLAQEHYPADAATPYGEPLPDHFLGAAQMVDELDLLPDAVAATLLADIGRYVPDWNLLVSERCNSTVAELVKGVDEVQKLTHFARVDSLATPEERAQQAETMRKMLLAMVTDIRVVLIKLAMRTRTLQFLSNAPDSPEKRAVAKETLDIFAPLANRLGVWQLKWQLEDLGFRHQEPEKYREIALLLDEKRTERLEYIENFLDILRTELKKYNIHFEVAGRPKHIYSIYKKMVKKKLSFDGLFDIRAVRILVDTVPECYTTLGIVHSLWQPIPGEFDDYIANPKGNGYKSLHTVIVGPEEKGVEVQIRTFDMHQFNEFGVAAHWRYKEGGKGDSAYEQKIAWLRQLLDWRENMAESGKEDLAAAFKTELFNDTIYVLTPHGKVLSLPTGATPIDFAYALHSSIGDRCRGAKVEGQIVPLSTPLENGQRVEIITAKEGHPSVNWLYEGWVKSGKAIGKIRAYIRQQNADTVREEGRVQLDKQLAKLTPKPNLQELAENLGYKKPEDLYTAVGQGEISNRAIQKACGTLNEPPPVPVSATTIVKQSKIKKGGKTGVLIDGEDGLMTTLAKCCKPAPPDDIAGFVTRERGISVHRKTCPSFRHLAEHAPEKVLDASWAALQEGQVFAVDIEIRAQDRSGLLRDVSDALARHKLNVTAVQTQSRDLEASMRFTLEVKQVNDLPRVLAGLGDVKGVLSVTRL

SEQ ID NO: 2878 - protein, 737 aa, Neisseria; identical to SEQ ID NO: 2264

SEQ ID NO: 2879 - protein, 737 aa, Neisseria
MTAISPIQDTQSATLQELREWFDSYCTALPNNDKKLVLAARSLAEAHYPADAATPYGEPLPDHFLGAAQMVHELDLLPDAVAATLLADIGRYVPDWNLLVSERCNSTVAELVKGVDEVQKLTHFARVDSLATPEERAQQAETMRKMLLAMVTDIRVVLIKLAMRTRTLQFLSNAPDSPEKRAVAKETLDIFAPLANRLGVWQLKWQLEDLGFRHQEPEKYREIALLLDEKRTERLEYIENFLNILRTELKKYNIHFEVAGRPKHIYSIYKKMVKKKLSFDGLFDIRAVRILVDTVPECYTTLGIVHSLWQPIPGEFDDYIANPKGNGYKSLHTVIVGPEDKGVEVQIRTFDMHQFNEFGVAAHWRYKEGGKGDSAYEQKIAWLRQLLDWRENMAESGKEDLAAAFKTELFNDTIYVLTPHGKVLSLPTGATPIDFAYALHSSIGDRCRGAKVEGQIVPLSTPLENGQRVEIITAKEGHPSVNWLYEGWVKSNKAIGKIRAYIRQQNADTVREEGRVQLDKQLAKLTPKPNLQELAENLGYKKPEDLYTAVGQGEISNRAIQKACGTLNEPPPVPVSETTIVKQSKIKKGGKNGVLIDGEDGLMTTLAKCCKPAPPDDIVGFVTRDRGISVHRKTCPSFRHLAEHAPEKVLDASWAALQEGQVFAVDIEIRAQDRSGLLRDVSDALARHKLNVTAVQTQSRDLEASMRFTLEVKQVTDLPRVLASLGDVKGVLSVTRL

SEQ ID NO: 2880 - protein, 125 aa, Neisseria
MCEFKDFRRNIPCFEEYDENSFIGKWYDDGVWDDEEYWKLENDLIEVRRKYPYPMDIPRDIVIGIGTIIDFLMVPNWELFEIKASPWLPDSVGIHERYERFTTMLRYIFTEKDIVNVRFDYYNKK

SEQ ID NO: 2881 - protein, 125 aa, Neisseria; identical to SEQ ID NO: 952

SEQ ID NO: 2882 - protein, 125 aa, Neisseria
MCEFKDFRRNIPCFEEYDENSFIGKWYDDGVWDDEEYWKLENDLIEVRKKYPYPMDIPRDIVIGIGTIIDFLMVPNWELFEIKASPWLPDSVGIHERYERFTTMLRYIFTEKDIVNVRFDYYNKK

SEQ ID NO: 2883 - protein, 223 aa, Neisseria; identical to SEQ ID NO: 390

SEQ ID NO: 2884 - protein, 223 aa, Neisseria
  VARIANT (1)...(223): Xaa = Any Amino Acid
MMKTFKNIFSAAILSAALPCAYAAGLPQSAVLXYSGSYGIPATMTFERSGNAYKIVSTIKVPLYNIRFESGGTVVGNTLHPTYYRDIRRGKLYAEAKFADGSVTYGKAGESKTEQSPKAMDLFTLAWQLAANDAKLPPGLKITNGKKLYSVGGLNKAGTGKYSIGGVETEVVKYRVRRGDDAVMYFFAPSLNNIPAQIGYTDDGKTYTLKLKSVQINGQAAKP

SEQ ID NO: 2885 - protein, 223 aa, Neisseria; identical to SEQ ID NO: 388

SEQ ID NO: 2886 - protein, 366 aa, Neisseria
METQLYIGIMSGTSMDGADAVLVRMDGGKWLGAEGHAFTPYPDRLRRKLLDLQDTGTDELHRSRMLSQELSRLYAQTAAELLCSQNLAPCDITALGCHGQTVRHAPEHGYSIQLADLPLLAELTRIFTVGDFRSRDLAAGGQGAPLVPAFHEALFRDDRETRVVLNIGGIANISVLPPGAPAFGFDTGPGNMLMDAWTQAHWQLPYDKNGAKAAQGNILPQLLGRLLAHPYFSQPHPKSTGRELFALNWLETYLDGGENRYDVLRTLSRFTAQTVWDAVSHAAADARQMYICGGGIRNPVLMADLAECFGTRVSLHSTAELNLDPQWVEAAAFAWLAACWINRIPGSPHKATGASKPCILGAGYYY

SEQ ID NO: 2887 - protein, 366 aa, Neisseria
  VARIANT (1)...(366): Xaa = Any Amino Acid
METQLYIGIMSGTSMDGADAVLIRMDGGKWLGAEGHAFTPYPGRLRRQLLDLQDTGADELHRSRILSQELSRLYAQTAAELLCSQNLAPSDITALGCHGQTVRHAPEHGYSIQLADLPLLAXXXXXXXXXXXXXXXXXXXXXXXXXXXXXXXXXXXXXXXXXXXXXXXXXXXXXXXXXXXXXXXXXXXXXXXXXXXXXXXXXQLPYDKNGAKSAQGNILPQLLDRLLAHPYFAQRHPKSTGRELFAINWLETYLDGGENRYDVLRTLSRFTAQTVCDAVSHAAADARQMYICDGGIRNPVLMADLAECFGTRVSLHSTADLNLDPQWVEAAXFAWLAACWINRIPGSPHKATGASKPCILXAGYYY

SEQ ID NO: 2888 - protein, 366 aa, Neisseria
METQLYIGIMSGTSMDGADAVLIRMDGGKWLGAEGHAFTPYPGRLRRKLLDLQDTGADELHRSRMLSQELSRLYAQTAAELLCSQNLAPSDITALGCHGQTVRHAPEHSYSVQLADLPLLAERTQIFTVGDFRSRDLAAGGQGAPLVPAFHEALFRDDRETRAVLNIGGIANISVLPPDAPAFGFDTGPGNMLMDAWMQAHWQLPYDKNGAKAAQGNILPQLLDRLLAHPYFAQPHPKSTGRELFALNWLETYLDGGENRYDVLRTLSRFTAQTVFDAVSHAAADARQMYICGGGIRNPVLMADLAECFGTRVSLHSTAELNLDPQWVEAAAFAWMAACWVNRIPGSPHKATGASKPCILGAGYYY

SEQ ID NO: 2889 - protein, 366 aa, Neisseria
  VARIANT (1)...(366): Xaa = Any Amino Acid
METQLYIGIMSGTSMDGADAVLIRMDGGKWLGAEGHAFTPYPGRLRRQLLDLQDTGADELHRSRILSQELSRLYAQTAAELLCSQNLAPSDITALGCHGQTVRHAPEHGYSIQLADLPLLAERTRIFTVGDFRSRDLAAGGQGAPLVPAFHEALFRDNRETRAVLNIGGIANISVLPPDAPAFGFDTGPGNMLMDAWTQAHWQLPYDKNGAKAAQGNILPQLLDRLLAHPYFAQPHPKSTGRELFALNWLETYLDGGENRYDVLRTLSRFTAQTVCDAVSHAAADARQMYICGGGIRNPVLMADLAECFGTRVSLHSTADLNLDPQWVEAAXFAWLAACWINRIPGSPHKATGASKPCILXAGYYY

SEQ ID NO: 2890 - protein, 366 aa, Neisseria; identical to SEQ ID NO: 2888

SEQ ID NO: 2891 - protein, 243 aa, Neisseria
MALLSIRKLHKQYGSVTAIQSLDLDLEKGEVIVLLGPSGCGKSTLLRCVNGLEPHQGGSIVMDGVGEFGKDVSWQTARQKVGMVFQSNELFAHMTVIENIFLGPVKEQNRDRAEAEAQAGKLLERVGLLDRKNAYPRELSGGQKQRIAIVRALCLNPEVILLDEITAALDPEMVREVLEVVLELAREGMSMLIVTHEMGFARKVADRIVFMDKGGIVESSDPETFFSAPKSERARQFLAGMDY

SEQ ID NO: 2892 - protein, 253 aa, Neisseria
  VARIANT (1)...(253): Xaa = Any Amino Acid
VVMIKIRNIHKTFGENTILRGIDLDVCKGQVVVILGPSGSGKTTFLRCLNALEMPEDGQIEFDNERPLKIDFSKKPSKHDILALRRKSXMVFQQYNLFPHKTALENVMEGPVAVQGKPAAQAREEALKLLEKVGLGDKVDLYPYQLSGGQQQRVGIARALAIQPELMLFDEPTSALDPELVQDVLDXMKELAQEGWTMVVVTHEIKFALEVATTXVVMDXGVIVEQGSPQDLFDHPKHERTRRFLSQIQSTKI

SEQ ID NO: 2893 - protein, 253 aa, Neisseria
VVMIKIRNIHKTFGKNTILRGINLDVCKGQVVVILGPSGSGKTTFLRCLNALEMPEDGQIEFDNERPLKIDFSKKPSKHDILALRRKSGMVFQQYNLFPHKTALENVMEGPVAVQGKPAAQAREEALKLLEKVGLGDKVDLYPYQLSGGQQQRVGIARALAIQPELMLFDEPTSALDPELVQDVLNAMKELAREGWTMVVVTHEIKFALEVATTVVVMDGGVIVEQGSPKELFDHPKHERTRRFLSQIQSTKI

SEQ ID NO: 2894 - protein, 251 aa, Neisseria
MIKIRNIHKTFGENTILRGIDLDVGKGQVVVILGPSGSGKTTFLRCLNALEMPEDGQIEFDNARPLRIDFSKKTSKHDILALRRKSGMVFQQYNLFPHKTVLENVMEGPVAVQGKPAAQAREEALKLLEKVGLGDKVDLYPYQLSGGQQQRVGIARALAIQPELMLFDEPTSALDPELVQDVLDAMKELAREGWTMVVVTHEIKFTLEVATNVVVMDGGVIVEQGSPKELFDHLKHERTRRFLSQIQSAKI

SEQ ID NO: 2895 - protein, 251 aa, Neisseria; identical to SEQ ID NO: 1364

SEQ ID NO: 2896 - protein, 251 aa, Neisseria
MIKIRNIHKTFGKNTILRGINLDVCKGQVVVILGPSGSGKTTFLRCLNALEMPEDGQIEFDNERPLKIDFSKKPSKHDILALRRKSGMVFQQYNLFPHKTALENVMEGPVAVQGKPAAQAREEALKLLEKVGLGDKVDLYPYQLSGGQQQRVGIARALAIQPELMLFDEPTSALDPELVQDVLNAMKELAREGWTMVVVTHEIKFALEVATTVVVMDGGVIVEQGSPKELFDHPKHERTRRFLSQIQSTKI

SEQ ID NO: 2897 - protein, 342 aa, Neisseria
  VARIANT (1)...(342): Xaa = Any Amino Acid
MSGNASSPSSSSAIGLIWFGAAVSIAEISTGTLLAPLGWQRGLAALLLGHAVGGALFFAAAYIGALTGRSSMESVRLSFGKRGSVLFSVANMLQLAGWTAVMIYAGATVSSALGKVLWDGESFVWWALANGALIVLWLVFGARKTGGLKTVSMLLMLLAVLWLSAEVFSTAGSTAAQVSDGMSFGTAVELSAVMPLSWLPLAADYTRHARRPFAATLTATLAYTLTGCWMYALGLAAALFTGETDVAKILLGAXLGAAGILAVVLSTVTTTFLDAYSAGASANNISARFAETPVAVXVTLIGTVLAVMLPVTEYENFLLLIGSVFAPMAGGFDCRLFRLETA

SEQ ID NO: 2898 - protein, 342 aa, Neisseria
  VARIANT (1)...(342): Xaa = Any Amino Acid
MSGNASSPSSSAAIGLIWFGAAVSIAEISTGTLLAPLGWQRGLAALLLGHAVGGALFFAAAYIGALTGRSSMESVRLSFGKRGSVLFSVANMLQLAGWTAVMIYAGATVSSALGKVLWDGESFVWWALANGALIVLWLVFGARKTGGLKTVSMLLMLLAVLWLSAEVFSTAGSTAAQVSDGMSFGTAVELSAVMPLSWLPLAADYTRHARRPFAATLTATLAYTLTGCWMYALGLAAALFTGETDVAKILLGAGLGAAGILAVVLSTVTTTFLDAYSAGVSANNISAKLSEIPIAVAVAVVGTLLAVLLPVTEYENFLLLIGSVFAPMAXGFDCRLFRLETA

SEQ ID NO: 2899 - protein, 288 aa, Neisseria
MPSETPKARRRLSDGIASDNHTKESIMLTLYGETFPSRLLLGTAAYPTPEILKQSVRTARPAMITVSLRRTGCGGEAHGQGFWSLLQETGVPVLPNTAGCQSVQEAVTTAQMAREVFETDWIKLELIGDDDTLQPDVFQLVEAAEILIKDGFKVLPYCTEDLIACRRLLDAGCQALMPWAAPIGTGLGAVHAYALKILRERLPDTPLIIDAGLGLPSQAAQVMEWGFDGVLLNTAVSRSGDPVNMARAFALAVESGRLAFEAGPVEARTKAQASTPTVGQPFWHSAEY

SEQ ID NO: 2900 - protein, 269 aa, Neisseria
HYTKEPIMLTLYGETFPSRLLLGTAAYPTPEILKQSIQTAQPAMITVSLRRAGSGGEAHGQGFWSLLQETGVPVLPNTAGCQSVQEAVTTAQMAREVFETDWIKLELIGDDDTLQPDVFQLVEAAEILIKDGFKVLPYCTEDLIACRRLLDAGCQALMPWAAPIGTGLGAVHAYALNVLRERLPDTPLIIDAGLGLPSQAAQVMEWGFDGVLLNTAVSRSGDPVNMARAFALAVESGRLAFEAGPVEARDKAQASTPTVGQPFWHSAEY

SEQ ID NO: 2901 - protein, 272 aa, Neisseria
LLIHYTKEPIMLTLYSETFPSRLLLGTAAYPTPEILKQSVRTARPAMITVSLRRAGCGGEAHGQGFWSLLQETGVPVLPNTAGCQSVQEAVTTAQMAREVFETDWIKLELIGDDDTLQPDVFQLVEAAEILIKDGFKVLPYCTEDLIACRRLLDAGCQALMPWAAPIGTGLGAVHAYALNVLRERLPDTPLIIDAGLGLPSQAAQVMEWGFDGVLLNTAVSRSGDPVNMARAFALAVESGRLAFEAGPVEARDKAQASTPTVGQPFWHSAEY

SEQ ID NO: 2902 - protein, 262 aa, Neisseria
MLTLYGETFPSRLLLGTAAYPTPEILKQSVRTARPAMITVSLRRTGCGGEAHGQGFWSLLQETGVPVLPNTAGCQSVQEAVTTAQMAREVFETDWIKLELIGDDDTLQPDVFQLVEAAEILIKDGFKVLPYCTEDLIACRRLLDAGCQALMPWAAPIGTGLGAVHAYALKILRERLPDTPLIIDAGLGLPSQAAQVMEWGFDGVLLNTAVSRSGDPVNMARAFALAVESGRLAFEAGPVEARTKAQASTPTVGQPFWHSAEY

SEQ ID NO: 2903 - protein, 262 aa, Neisseria; identical to SEQ ID NO: 2585

SEQ ID NO: 2904 - protein, 262 aa, Neisseria
MLTLYSETFPSRLLLGTAAYPTPEILKQSVRTARPAMITVSLRRAGCGGEAHGQGFWSLLQETGVPVLPNTAGCQSVQEAVTTAQMAREVFETDWIKLELIGDDDTLQPDVFQLVEAAEILIKDGFKVLPYCTEDLIACRRLLDAGCQALMPWAAPIGTGLGAVHAYALNVLRERLPDTPLIIDAGLGLPSQAAQVMEWGFDGVLLNTAVSRSGDPVNMARAFALAVESGRLAFEAGPVEARDKAQASTPTVGQPFWHSAEY

SEQ ID NO: 2905 - protein, 290 aa, Neisseria
MEIWNMLNTWPDAVPIRAEAAESVAAVAALLLARALLLNIHFRRHPDFGIESKRRFLVASRNITLLLVLFSLAFIWSAQIQTLALSMFAVAAAVVVATKELIMCLSGSILRSATQQYSVGDYIEINGLRGRVVDINLLNTLMMQVGPNPLVGQLAGTTVSFPNSLLLSHPVRRDNILGDYVIHTVEIPVPIHLDSDEAVCRLKAVLEPLCAPYIPAIQRYLENVQAEKLFITPAARPRVTRVPYDDKAYRIIVRFASPVSKRLEIQQAVMDEFLRVQYRLLNHPAGSETL

SEQ ID NO: 2906 - protein, 290 aa, Neisseria
  VARIANT (1)...(290): Xaa = Any Amino Acid
MEIWNMLDTWLGAVPIRAEAVESVAAVAALLLARALLLNIHFKRHPDFGIESKRRFLVASRNITLLLVLFSLAFIWSAQIQTLALSMFAVAAAVVVATKELIMCLSGSILRSATQQYSVGDYIEINGLRGRVVDINLLNTLMMQVGPNPLVGQLAGTTVSFPNSLLLSHPVRRDNILGDYVIHTVEIPVPIHLDSDEAVCRLKAVLEPLCAPYIPAIQRXLENVQAEKLFITPAARPRVTRVPYDDKAYRIIVRFASPVSKRLEIQQAVMDEFLRVQYRLLNHPAGSETL

SEQ ID NO: 2907 - protein, 290 aa, Neisseria
MEIWNMLDTWLGAVPIRAEAVESVAVVAALLLARALLLNIHFKRHPDFGIESKRRFLVASRNITLLLVLFSLAFIWSAQIQTLALSMFAVAAAVVVATKELIMCLSGSILRSATQQYSVGDYIEINGLRGRVVDINLLNTLMMQVGPNPLVGQLAGTTVSFPNSLLLSHPVRRDNILGDYVIHTVEIPVPIHLDSDEAVCRLKAVLEPLCAPYIPAIQRHLENVQAEKLFITPAAKPRVTRVPYDDKAYRIIVRFASPVSKRLEIQQAVMDEFLRVQYRLLNYPAGSETL

SEQ ID NO: 2908 - protein, 678 aa, Neisseria
MIDNALLHLGEEPRFNQIQTEDIKPAVQTAIAEARGQIAAVKAQTHTGWANTVERLTGITERVGRIWGVVSHLNSVVDTPELRAVYNELMPEITVFFTEIGQDIELYNRFKTIKNSPEFATLSPAQKTKLDHDLRDFVLSGAELPPERQAELAKLQTEGAQLSAKFSQNVLDATDAFGIYFDDAAPLAGIPEDALAMFAAAAQSEGKTGYKIGLQIPHYLAVIQYAGNRELREQIYRAYVTRASELSNDGKFDNTANIDRTLENALKTAKLLGFKNYAELSLATKMADTPEQVLNFLHDLARRAKPYAEKDLAEVKAFAREHLGLADPQPWDLSYAGEKLREAKYAFSETEVKKYFPVGKVLAGLFAQIKKLYGIGFAEKTVPVWHKDVRYFELQQNGKTIGGVYMDLYAREGKRGGAWMNDYKGRRRFADGTLQLPTAYLVCNFAPPVGGKEARLSHDEILTLFHETGHGLHHLLTQVDELGVSGINGVEWDAVELPSQFMENFVWEYNVLAQMSAHEETGEPLPKELFDKMLAAKNFQRGMFLVRQMEFALFDMMIYSESDECRLKNWQQVLDSVRKEVAVIQPPEYNRFANSFGHIFAGGYSAGYYSYAWAEVLSTDAYAAFEESDDVAATGKRFWQEILAVGGSRSAAESFKAFRGREPSIDALLRQSGFDNAA

SEQ ID NO: 2909 - protein, 476 aa, Neisseria
  VARIANT (1)...(476): Xaa = Any Amino Acid
MTDNALLHLGEEPRFDQIKTEDIKPALQTAIAEAREQIAAIKAQTHTGWANTVEPLTGITERVGRIWGVVSHLNCVADTPELRAVYNELMPEITVFFTEIGQDIELYNRFKTIKNSPEFDTLSPAQKTKLNHYASEKLREAKYAFSETXVKKYFPVGXVLNGLFAQXKKLYGIGFTEKTVPVWHKDVRYXELQQNGEXIGGVYMDLYAREGKRGGAWMNDYKGRRRFSDGTLQLPTAYLVCNFAPPVGGREARLSHDEILILFHETGHGLHHLLTQVDELGVSGINGVXWDAVELPSQFMENFVWEYNVLAQXSAHEETGVPLPKELXDKXLAAKNFQXGMFXVRQXEFALFDMMIYSEDDEGRLKNWQQVLDSVRKKVAVIQPPEYNRFALSFGHIFAGGYSAAXYSYAWAEVLSADAYAAFEESDDVAATGKRFWQEILAVGXSRSGAESFKAFRGREPSIDALLRHSGFDNAV

SEQ ID NO: 2910 - protein, 678 aa, Neisseria
MTDNALLHLGEEPRFDQIKTEDIKPALQTAIAEAREQIAAIKAQTHTGWANTVEPLTGITERVGRIWGVVSHLNSVTDTPELRAAYNELMPEITVFFTEIGQDIELYNRFKTIKNSPEFDTLSHAQKTKLNHDLRDFVLSGAELPPEQQAELAKLQTEGAQLSAKFSQNVLDATDAFGIYFDDAAPLAGIPEDALAMFAAAAQSEGKTGYKIGLQIPHYLAVIQYADNRKLREQIYRAYVTRASELSDDGKFDNTANIDRTLENALQTAKLLGFKNYAELSLATKMADTPEQVLNFLHDLARRAKPYAEKDLAEVKAFARESLGLADLQPWDLGYAGEKLREAKYAFSETEVKKYFPVGKVLNGLFAQIKKLYGIGFTEKTVPVWHKDVRYFELQQNGETIGGVYMDLYAREGKRGGAWMNDYKGRRRFSDGTLQLPTAYLVCNFTPPVGGKEARLSHDEILTLFHETGHGLHHLLTQVDELGVSGINGVEWDAVELPSQFMENFVWEYNVLAQMSAHEETGVPLPKELFDKMLAAKNFQRGMFLVRQMEFALFDMMIYSEDDEGRLKNWQQVLDSVRKEVAVVRPPEYNRFANSFGHIFAGGYSAGYYSYAWAEVLSADAYAAFEESDDVAATGKRFWQEILAVGGSRSAAESFKAFRGREPSIDALLRHSGFDNAA

SEQ ID NO: 2911 - protein, 491 aa, Neisseria
MIDNALLHLGEEPRFNQIKTEDIKPAVQTAIAEARGQIAAVKAQTHTGWANTVERLTGITERVGRIWGVVSHLNSVVDTPELRAVYNELMPEITVFFTEIGQDIELYNRFKTIKNSPEFATLSPAQKTKLDHDLRDFVLSGAELPPERQAELAKLQTEGAQLSAKFSQNVLDATDAFGIYFDDAAPLAGIPEDALAMFAAAAQSEGKTGYKIGLQIPHYLAVIQYAGNRELREQIYRAYVTRASELSNDGKFDNTANIDRTLENALKTAKLLGFKNYAELSLATKMADTPEQVLNFLHDLARRAKPYAEKDLAEVKAFAREHLGLADPQPWDLSYAGEKLREAKYAFSETEVKKYFPVGKVLAGLFAQIKKLYGIGFAEKTVPVWHKDVRYFELQQNGKTIGGVYMDLYAREGKRGGAWMNDYKGRRRFADGTLQLPTAYLVCNFAPPVGGKEARLSHDEILTLFHETGHGLHHLLTQVDELGVSGINGVK

SEQ ID NO: 2912 - protein, 678 aa, Neisseria; identical to SEQ ID NO: 805

SEQ ID NO: 2913 - protein, 678 aa, Neisseria; identical to SEQ ID NO: 2910

SEQ ID NO: 2914 - protein, 168 aa, Neisseria
MLSPPRRKTAAHQSSRLSFACGKNAACCRDQNQYRAASSPNRGLPRFPITPTAAAVHPYPRFRHLPFQAAGIGAEQAAVESCFIRTNALAVGKSGRPCQIMRYFGRVLSFVSGGLFLRAIRICLGAWQTAAAVQSKCLAISCRQASGCRPTYRAGFCLSDLAAFRPVT

SEQ ID NO: 2915 - protein, 110 aa, Neisseria
  VARIANT (1)...(110): Xaa = Any Amino Acid
YLRFHYLPFQAAGIGTEQVAVKSCFIQINTLVVGKFGRLCQIMRYFGRVLFFVSGGLFLRVIPICLSAXQMVAAVQSKCLAISCRXASGCCPTYXAGFCLSDLTAFRPVT

SEQ ID NO: 2916 - protein, 107 aa, Neisseria
YLRFHYLPFQAAGIGTEQVAVKSCFIQINTLVVGKFGQLCQIMRYFGRVLFFVSGGLFLRVIPICLSAQMVAAVQSKCLAISCRASWCCPTYAGFCLSDLTAFRPVT

SEQ ID NO: 2917 - protein, 279 aa, Neisseria; identical to SEQ ID NO: 2210

SEQ ID NO: 2918 - protein, 204 aa, Neisseria
  VARIANT (1)...(204): Xaa = Any Amino Acid
GEQIFGKICIQCHAADSNVPNAPKLEHNGDXAPRIQGFDTLFQHALNGFNAMPAKGGAADLTDQELKRAITYMANKSGGSFPNPDEAAPADNAASGTASAPADSAAPAEAKAEDKGAAPAVGVDGKKVFEATCQVCHGGSIPGIPGIGKKDDWAPRIKKGKETLHKHALEGFNAMPAKXGNAGLSDDEVKAAVDYMANQSGAKF

SEQ ID NO: 2919 - protein, 279 aa, Neisseria
MKQLRDNKAQGSALFTLVSGIVIVIAVLYFLIKLAGSGSFGDVDATTEAATQTRIQPVGQLTMGDGIPVGERQGEQIFGKICIQCHAADSNVPNAPKLEHNGDWAPRIAQGFDTLFQHALNGFNAMPAKGGAVDLTDQELKRAITYMANKSGGSFPNPDEAAPADNAASGTASAPADSAAPAEAKAEDKGAAAPAVGVDGKKVFEATCQVCHGGSIPGIPGIGKKDDWAPRIKKGKETLHKHALEGFNAMPAKGGNAGLSDDEVKAAVDYMANQSGAKF

SEQ ID NO: 2920 - protein, 125 aa, Neisseria
MEAFKTLIWIINIISALAVIVLVLLQHGKGADAGATFGSGSGSAQGVFGSAGNANFLSRSTAVAATFFFATCMGYGVYSHPHDKTRFGLQQHTTDSASTQTRKQYRTFCPCSSAAEITVFQMPTW

SEQ ID NO: 2921 - protein, 38 aa, Neisseria
MEPFKTLIWIVNLISALAVFVLVLLQHGKGADAGATFG

SEQ ID NO: 2922 - protein, 125 aa, Neisseria
MEAFKTLIWIVNIISALAVIVLVLLQHGKGADAGATFGSGSGSAQGVFGSAGNANFLSRSTAVAATFFFATCMGYGVYSHPHDKTRFGLQQRTTNSASTQTRKQYRTFCPCSSAAEITVFQMPTW

SEQ ID NO: 2923 - protein, 531 aa, Neisseria
MSQEILDQVRRRRTFAIISHPDAGKTTLTEKLLLFSGAIQSAGTVKGKKTGKFATSDWMDIEKQRGISVASSVMQFDYKDHTVNLLDTPGHQDFSEDTYRVLTAVDSALMVIDAAKGVEAQTIKLLNVCRLRDTPIVTFMNKYDREVRDSLELLDEVEDILQIRCAPVTWPIGMGKNFKGVYHILNDEIYLFEAGGERLPHEFDIIKGINNPELEQRFPLEIQQLRDEIELVQAASNEFNLDEFLAGELTPVFFGSAINNFGIQEILNSLIDWAPAPKPRDATMRMVGPDEPKFSGFIFKIQANMDPKHRDRIAFLRVCSGKFERGMKMKHLRINREIAASSVVTFMSHDRELAEEAYAGDIIGIPNHGNIQIGDSFSEGEQLAFTGIPFFAPELFRSVRIKNPLKIKQLQKGLQQLGEEGAVQVFKPMSGADLILGAVGVLQFEVVTSRLANEYGVEAVFDSASIWSARWVSCDDKKKLAEFEKANAGNLAIDAGGNLAYLAPNRVNLGLTQERWPDIVFHETREHSVKL

SEQ ID NO: 2924 - protein, 531 aa, Neisseria; identical to SEQ ID NO: 1202

SEQ ID NO: 2925 - protein, 531 aa, Neisseria
MSQEILDQVRRRRTFAIISHPDAGKTTLTEKLLLFSGAIQSAGTVKGKKTGKFATSDWMDIEKQRGISVASSVMQFDYKDHTVNLLDTPGHQDFSEDTYRVLTAVDSALMVIDAAKGVEAQTIKLLNVCRLRNTPIVTFMNKYDREVRDSLELLDEVENILQIRCAPVTWPIGMGKNFKGVYHILNDEIYLFEAGGERLPHEFDIIKGIDNPELEQRFPLEIQQLRDEIELVQAASNEFNLDEFLAGELTPVFFGSAINNFGIQEILNSLIEWAPAPKPRDATVRMVEPDEPKFSGFIFKIQANMDPKHRDRIAFLRVCSGKFERGMKMKHLRINREIAASSVVTFMSHDRELVEEAYAGDIIGIPNHGNIQIGDSFSEGEQLTFTGIPFFAPELFRSVRIKNPLKIKQLQKGLQQLGEEGAVQVFKPMSGADLILGAVGVLQFEVVTSRLANEYGVEAVFDNASIWSARWVSCDDKKKLAEFEKANAGNLAIDAGGNLAYLAPNRVNLGLTQERWPDIVFHETREHSVKL

SEQ ID NO: 2926 - protein, 295 aa, Neisseria
MKYKRIVFKVGTSSITRSDGSLSRGKIQTITRQLAALHHAGHELVLVSSGAVAAGFGALGFKKRPVKIADKQASAAVGQGLLMEEYTANLSSDGIVSAQILLSRADFADKRRYQNAGGALSVLLQRRAIPIINENDTVSVEELKIGDNDTLSAQVAAMIQADLLVLLTDIDGLYTGNPNSNPDAVRLDKIEHINHEIIEMAGGSGSANGTGGMLTKIKAATIAAESGVPVYICSSLKPDSLAEAAEHQADGSFFVPRAKGLRTQKQWLAFYSESGGSVYVDESAEHALSEQGKAC

SEQ ID NO: 2927 - protein, 369 aa, Neisseria; identical to SEQ ID NO: 1634

SEQ ID NO: 2928 - protein, 369 aa, Neisseria
MKYKRIVFKVGTSSITHSDGSLSRGKIQTITRQLAALHHAGHELVLVSSGAVAAGFGALGFKKRPVKIADKQASAAVGQGLLMEEYTANLSSDGIVSAQILLSRADFADKRRYQNAGGALSVLLQRRAVPIINENDTVSVEELKIGDNDTLSAQVAAMIQADLLVLLTDIDGLYTGNPNSNPDAVRLDKIEHINHEIIEMAGGSGSANGTGGMLTKIKAATIATESGVPVYICSSLKPDALAEAADNQADGSFFVPRAKGLRTQKQWLAFYSESRGGVYVDEGAEHALSEQGKSLLMSGIAGIEGHFSRMDTVTVYSKATKQPLGKGRVLFGSAAAEDLLKLRKAKGVFIHRDDWISITPEIRLLLTEF

SEQ ID NO: 2929 - protein, 223 aa, Neisseria
MEIRFQTAFLRLVQMKTNASILTATRLVFPAAAARTGIVPAGFFPFPADGLRFVDDRLPVAVDVCQRVRQFGRKFRQLAFGELQADNAVFLFVVNAAHCHHGVKQLFKRFIIGGFKPIGRHNVQTVKIGVAPSVKIAAALAVVVEPQIGQLFIRHRGGCFHRHCQNQPFDFGTFGGGKLRFVAQHFGQPVERCQFVRPAQQRRHKTLNLVATHRVALFAFGIQ

SEQ ID NO: 2930 - protein, 243 aa, Neisseria
METNASILTATRLVFSAAAARTGIVPACFFAFPADGLRFVDDCLPVAVDIRQCIRQLGFQFRQLAFCELQTDSAVFLFVVNTAQCHDGIKQLFKRFIIDGFKPIGRHNIQTVKISIAPCVKIAAAVFVFIQPQIGQFFIRHRGGCFHRHCQNQPFDFGTFGGGKLRFVAQHFGQPVERCQFVRPAQQRRHKTLNLVATHRVALFAFGIQQFAQPPFGCFGKFSGIHHFPFQMGFAPYYRRNAV

SEQ ID NO: 2931 - protein, 278 aa, Neisseria
METNASILTATRLVFSAAAARTGIVPACFFAFPADGLRLVDDRLPVAVDIRQCIRQLGFQFRQLAFCELQTDSAVVLFVVNTAQCHDGIKQLFKRFIIDGFKPIGRHNIQTVKISIAPCVKIAAAVFVFIQPQIGQFFIRHRGGCFHRHCQNQPFDFGTFGGGKLRFVAQHFGQPVERCQFVRPAQQRRHKTLNLVATHRVALFAFGIQQFAQPPFGCFGKFSGIHHFPFPMGFAPYYSGLNLNQDKATKPQTVQIVRQGEATPYWFKFNPLYRRNAV

SEQ ID NO: 2932 - protein, 283 aa, Neisseria
MIIHHQFDPVLISIGPLAVRWYALSYILGFILFTFLGRRRIAQGLSVFTKESLDDFLTWGILGVILGGRLGYVLFYKFSDYLAHPLDIFKVWEGGMSFHGGFLGVVIAIWLFSRKHGIGFLKLMDTVAPLVPLGLASGRIGNFINGELWGRITDINAFWAMGFPQAHYEDAEAAAHNPLWAEWLQQYGMLPRHPSQLYQFALEGICLFAVVWLFSKKPRPTGQTAALFLGGYGVFRFIAEFARQPDDYLGLLTLGLSMGQWLSVPMIVLGIVGFVRFGMKKQH

SEQ ID NO: 2933 - protein, 283 aa, Neisseria; identical to SEQ ID NO: 1637

SEQ ID NO: 2934 - protein, 283 aa, Neisseria
MITHPQFDPVLISIGPLAVRWYALSYILGFILFTFLGRRRIAQGLSVFTKESLDDFLTWGILGVILGGRLGYVLFYKFSDYLAHPLDIFKVWEGGMSFHGGFLGVVIAIWLFGRKHGIGFLKLMDTVAPLVPLGLASGRIGNFINGELWGRVTDINAFWAMGFPQARYEDLEAAAHNPLWAEWLQQYGMLPRHPSQLYQFALEGICLFAVVWLFSKKQRPTGQVASLFLGGYGIFRFIAEFARQPDDYLGLLTLGLSMGQWLSVPMIVLGIVGFVRFGMKKQH

SEQ ID NO: 2935 - protein, 298 aa, Neisseria
MEFENIISAADKARILAEALPYIRRFSGSVAVIKYGGNAMTEPALKEGFARDVVLLKLVGIHPVIVHGGGPQINAMLEKVGKKGEFVQGMRVTDKETMDIVEMVLGGHVNKEIVSMINTYGGHAVGVSGRDDHFIKAKKLLVDTPEQNSVDIGQVGTVESIDTGLVKGLIERGCIPVVAPVGVGEKGEAFNINADLVAGKLAEELNAEKLLMMTNIAGVMDKTGNLLTKLTPKRIDGLIADGTLYGGMLPKIASAVEAAVNGVKATHIIDGRLPNALLLEIFTDAGIGSMILGRGEDA

SEQ ID NO: 2936 - protein, 298 aa, Neisseria; identical to SEQ ID NO: 1639

SEQ ID NO: 2937 - protein, 298 aa, Neisseria
MESENIISAADKARILAEALPYIRRFSGSVAVIKYGGNAMTEPALKEGFARDVVLLKLVGIHPVIVHGGGPQINAMLEKVGKKGEFVQGMRVTDKEAMDIVEMVLGGHVNKEIVSMINTYGGHAVGVSGRDDHFIKAKKLLIDTPEQNGVDIGQVGTVESIDTGLVKGLIERGCIPVVAPVGVGEKGEAFNINADLVAGKLAEELNAEKLLMMTNIAGVMDKTGNLLTKLTPKRIDELIADGTLYGGMLPKIASAVEAAVNGVKATHIIDGRVPNALLLEIFTDAGIGSMILGGGEDA

SEQ ID NO: 2938 - protein, 178 aa, Neisseria
MRTTSTFPTKTFKPAAMALAVATTLSACLGGGGGGTSAPDFNAGGTGIGSNSRATIAESAAVSYAGIKNEMCKDRSMLCAGRDDVAVTDRDAKIKAPRICIPETFQTQMTNIKNMINLKPAIEAGYTGRGVEVGIVDTGESVGSISFPELYGRKEHGYNENYKNKLQKLYGVYAEGSA

SEQ ID NO: 2939 - protein, 175 aa, Neisseria
MRTTPTFPTKTFKPTAMALAVATTLSACLGGGGGGTSAPDFNAGGTGIGSNSRATTAKSAAVSYAGIKNEMCKDRSMLCAGRDDVAVTDRDAKINAPPRICIPETFQTQMTHYKNLINLKPAIEAGYTGRGVEVGIVDTGESVGSISFPELYGRKEHGYNENYEKLYGVYAEGSA

SEQ ID NO: 2940 - protein, 207 aa, Neisseria
  VARIANT (1)...(207): Xaa = Any Amino Acid
XCANBEANYNATRALLYCCRRINGAMINACIDMRTTPTFPTKTFKPAAMALAVATTLSACLGGGGGGTSAPDFNAGGTGIGSNSRATTAKSAAISYAGIKNEMCKDRSMLCAGRDDVAVTDRDAKINAPPRICIPETLQTQMTHXKNLINLKPAIEAGYTGRGVEVGIVDTGESVGSISFPELYGRKEHGYNENYXKLYGVYAEGSA

SEQ ID NO: 2941 - protein, 454 aa, Neisseria
MSARGKGAGYLNSTGRHVPFLSAAKIGQDYSFFKNIKTDGGLLASLDSVEKTAGSEGDTPSYYVRRGNAARTASAAAHSAPAGLKHAVEQGGSNLENLMVELDASESSATPETVETAVADRTDMPGIRLRRTTFRTAAAVQHANTADGVRIFNSLAATVYADSAAAHADMQGRRLKAVSDGLDHNGTGLRVIAQTQQDGGTWEQGGVEGKMRGSTQTIGIAAKTGENTTAAATLGIGRSTWSENSANAKTDSISLFAGIRHDVGDIGYLKGLFSYGRYKNSISRSTGADEYAEGSVNGTLMQLGALGGVNVPFAATGDLTVEGGLRHDLLKQDAFAEKGSALGWSGNSLTEGTLVGLAGLKLSQPLSDKAVLSATAGVERDLNGRDYAVTGGFTGAAAATGKTGARNMPHTRRVAGLGVDVEFGNGWNGLARYSYTGSKQYGNHSGQIGVGYRF

SEQ ID NO: 2942 - protein, 454 aa, Neisseria
MSARGKGAGYLNSTGRRVPFLSAAKIGQDYSFFTNIETDGGLLASLDSVEKTAGSEGDTLSYYVRRGNAARTASAAAHSAPAGLKHAVEQGGSNLENLMVELDASESSATPETVETAAADRTDMPGIRPYGATFRAAAAVQHANAADGVRIFNSLAATVYADSTAAHADMQGRRLKAVSDGLDHNGTGLRVIAQTQQDGGTWEQGGVEGKMRGSTQTVGIAAKTGENTTAAATLGMGRSTWSENSANAKTDSISLFAGIRHDAGDIGYLKGLFSYGRYKNSISRSTGADEHAEGSVNGTLMQLGALGGVNVPFAATGDLTVEGGLRYDLLKQDAFAEKGSALGWSGNSLTEGTLVGLAGLKLSQPLSDKAVLFATAGVERDLNGRDYTVTGGFTGATAATGKTGARNMPHTRLVAGLGADVEFGNGWNGLARYSYAGSKQYGNHSGRVGVGYRF

SEQ ID NO: 2943 - protein, 454 aa, Neisseria
MSAGGKGAGYLNRTGQRVPFLSAAKIGRDYSFFTNIETDGGLLASLDSVEKTAGSEGDTLSYYVRRGNAARTASAAAHSAPAGLKHAVEQGGSNLENLMVELDASESSATPETVETAAADRTDMPGIRPYGATFRAAAAVQHANAADGVRIFNNLAATVYADSTAAHADMQGRRLKAVSDGLDHNATGLRVIAQTQQDGGTWEQGGVEGKMRGSTQTVGIAAKTGENTTAAATLGMGHSTWSENSANAKTDSISLFAGIRHDAGDIGYLKGLFSYGRYKNSISRSTGADEHAEGSVNGTLMQLGALGGVNVPFAATGDLTVEGGLRYDLLKQDAFAEKGSALGWSGNSITEGTLVGLAGLKLSQPLSDKAVLFATAGVERDLNGRDYTVTGGFTGATAATGKTGARNMPHTRLVAGLGADVEFGNGWNGLARYSYAGSKQYGNHSGRVGVGYRF

SEQ ID NO: 2944 - protein, 558 aa, Neisseria
MSFKTDAETAQSSTMRPIGEIAAKLGLNVDNIEPYGHYKAKINPAEAFKLPQKQGRLILVTAINPTPAGEGKTTVTIGLADALRHIGKDSVIALREPSLGPVFGVKGGAAGGGYAQVLPMEDINLHFTGDFHAIGAANNLLAAMLDNHIYQGNELNIDPKRVLWRRVVDMNDRQLRNIIDGMGKPVDGVMRPDGFDITVASEVMAVFCLAKDISDLKERFGNILVAYAKDGSPVYAKDLKAHGAMAALLKDAIKPNLVQTIEGTPAFVHGGPFANIAHGCNSVTATRLAKHLADYAVTEAGFGADLGAEKFCDIKCRLAGLKPDAAVVVATVRALKYNGGVERANLGEENLEALAKGLPNLLKHISNLKNVFGLPVVVALNRFVSDSDAELAMIEKACAEHGVEVSLTEVWGKGGAGGADLARKVVNAIDNQPNNFGFAYDVELGIKDKIRAIAQKVYGAEDVDFSAEASAEIASLEKLGLDKMPICMAKTQYSLSDNAKLLGCPEGFRIAVRGITVSAGAGFIVALCGNMMKMPGLPKVPAAEKIDVDEHGVIHGLF

SEQ ID NO: 2945 - protein, 558 aa, Neisseria; identical to SEQ ID NO: 2360

SEQ ID NO: 2946 - protein, 558 aa, Neisseria
MSFKTDAEIAQSSTMRPIGEIAAKLGLNVDNIEPYGHYKAKINPAEAFKLPQKQGRLILVTAINPTPAGEGKTTVTIGLADALRHIGKDSVIALREPSLGPVFGVKGGAAGGGYAQVLPMEDINLHFTGDFHAIGAANNLLAAMLDNHIYQGNELNIDPKRVLWRRVVDMNDRQLRNIIDGMGKPVDGVMRPDGFDITVASEVMAVFCLAKDISDLKERLGNILVAYAKDGSPVYAKDLKANGAMAALLKDAIKPNLVQTIEGTPAFVHGGPFANIAHGCNSVTATRLAKHLADYAVTEAGFGADLGAEKFCDIKCRLAGLKPDAAVVVATVRALKYNGGVERANLGEENLDALEKGLPNLLKHISNLKNVFGLPVVVALNRFVSDSDAELAMIEKACAEHGVEVSLTEVWGKGGAGGADLARKVVNAIESQTNNFGFAYDVELGIKDKIRAIAQKVYGAEDVDFSAEASAEIASLEKLGLDKMPICMAKTQYSLSDNAKLLGCPEDFRIAVRGITVSAGAGFIVALCGNMMKMPGLPKVPAAEKIDVDAEGVIHGLF

SEQ ID NO: 2947 - protein, 158 aa, Neisseria
MRADFMFADNMPVQVRQRAFYFKLSRFAAMPNMVGKPLFGRQAGQPGKMFGNILMFVRQHIDAEAAVFRQDRNDSRTPVYAQHHGRRLVGNRRNRRHCNAVTPCRTVCRDDMNACRTGCHRITERSLKSFLQIRHFSPLNRPLYKNAAHKASPHVQQF

SEQ ID NO: 2948 - protein, 158 aa, Neisseria
MRADFMFADNMPVQVRQRALYFKLSRFAAMPDVVGKPLFGRQAGQPGKMFGNILMFVRQRIDAEAAVFRQDRNDSRTPVDAQHHGRRLVGNRRDRRHCNAVTPCRTVCRDDMNACRARCHRITERSLKIFLQIRHFSPLNCPLYKNAAHKASPHVQQF

SEQ ID NO: 2949 - protein, 315 aa, Neisseria
MRADFMFADNMPVQVRQRALYFKLSRFAAMPDVVGKPLFGRQAGQPGKMFGNILMFVRQRIDAEAAVFRQDRNDSRTPVDAQHHGRRLVRNRRNRRHCNAVTPCRTVCRDDMNACRTGCHRITERSLKSFLQIRHFSPLNCPLYKNAAHKAPPMCSSSDSKSRRSDISARYGVLRVQRILDFGKFCQQVFKQQHFLAAQHFLDSVVTLVHFFADFLIQLLALGSQLQKNTSLVVGRFQADNQTRFFKAGQDTGQAGAQNARLIRQILKVQRAVFRQKTDNPPLLIGNIRLIQNRPELGHQGFPCLYQTDIDRRMF

SEQ ID NO: 2950 - protein, 428 aa, Neisseria
MLSFGYLGVQTAFTLQSSQMSRIFQTLGADPHNLGWFFILPPLAGMLVQPIVGYYSDRTWKPRLGGRRLPYLLYGTLIAVIVMILMPNSGSFGFGYASLAALSFGALMIALLDVSSNMAMQPFKMMVGDMVNEEQKSYAYGIQSFLANTDAVVAAILPFVFAYIGLANTAEKGVVPQTVVVAFYVGAALLIITSAFTISKVKEYDPETYARYHGIDVAANQEKANWFELLKTAPKVFWTVTPVQFFCWFAFRYMWTYSAGAIAENVWHTTDASSVGHQEAGNRYGVLAAVSVAAVICSFILAKVPNKYHKAGYFGCLALGALGFFSIFFIYNQYALILSYILIGIAWAGIITYPLTIVANALSGKHMDTYLGLFNGSVCMPQIVASLLSFVLFPMLGGHQATMFLVAGAVLLLGAFSVCLIKEIHGGV

SEQ ID NO: 2951 - protein, 429 aa, Neisseria
MLSFGFLGVQTAFTLQSSQMSRIFQTLGADPHNLGWFFILPPLAGMLVQPIVGHYSDRTWKPRLGGRRLPYLLYGTLIAVIVMILMPNSGSFGFGYASLAALSFGALMIALLDVSSNMAMQPFKMMVGDMVNEEQKGYAYGIQSFLANTGAVVAAILPFVFAYIGLANTAEKGVVPQTVVVAFYVGAALLVITSAFTIFKVKEYDPETYARYHGIDVAANQEKANWIELLKTAPKAFWTVTLVQFFCWFAFQYMWTYSAGAIAENVWHTTDASSVGYQEAGNWYGVLAAVQSVAAVICSFVLAKVPNKYHKAGYFGCLALGALGFFSVFFIGNQYALVLSYTLIGIAWAGIITYPLTIVTNALSGKHMGTYLGLFNGSICMPQIVASLLSFVLFPMLGGLQATMFLVGGVVLLLGAFSVFLIKETHGGV

SEQ ID NO: 2952 - protein, 429 aa, Neisseria
MLSFGFLGVQTAFTLQSSQMSRIFQTLGADPHSLGWFFILPPLAGMLVQPIVGHYSDRTWKPRLGGRRLPYLLYGTLIAVIVMILMPNSGSFGFGYASLAALSFGALMIALLDVSSNMAMQPFKMMVGDMVNEEQKGYAYGIQSFLANTGAVVAAILPFVFAYIGLANTAEKGVVPQTVVVAFYVGAALLVITSAFTIFKVKEYNPETYARYHGIDVAANQEKANWIELLKTAPKAFWTVTLVQFFCWFAFQYMWTYSAGAIAENVWHTTDASSVGYQEAGNWYGVLAAVQSVAAVICSFVLAKVPNKYHKAGYFGCLALGALGFFSVFFIGNQYALVLSYTLIGIAWAGIITYPLTIVTNALSGKHMGTYLGLFNGSICMPQIVASLLSFVLFPMLGGLQATMFLVGGVVLLLGAFSVFLIKETHGGV

SEQ ID NO: 2953 - protein, 203 aa, Neisseria
MSDTPATRDFGLIDGRAVTGYVLSNRRGTCVFVLDLGGIVQEFSVLADGVRENPVVSFDDAASYADNPFQINKQIGRVAGRIRGAAFDINGRTYRVEANEGRNALHGGSHGLAVTRFNAVAADGRRLSQRFGYFLPLGRGRPAYRYLSRHRARRHGVRPDAAHLLAAGRGPARCGSAYSAGRTYSGRCRKTARLNGFRRPRSI

SEQ ID NO: 2954 - protein, 218 aa, Neisseria
MSDTPATRDFGLIDGRAVTGYVLSNRRGTRVCVLDLGGIVQEFSVLADGVRENLVVSFDDAASYADNPFQINKQIGRVAGRIRGAAFDINGRTYRVEANEGRNALHGGSHGLAVTRFNAVAADGRSVVLRSRLATVGRRLSQRFGFGYFLPLGRGRPAYRYLSRHRARRHGVRPDAAHLLAAGRGPARCGSAYSAGRTYAGRCRKTARLNGFRRPRSI

SEQ ID NO: 2955 - protein, 218 aa, Neisseria
  VARIANT (1)...(218): Xaa = Any Amino Acid
MSDTPATRDFGLIDGRAVTGYVLSNRRGTRVCVLDLGGIVQEFSVLADGVRENLVVSFDDAASYADNPFQINKQIGRVAGRIRGAAFDINGRTYRVEANEGRNALHGGSHGLAVTRFNAVAADGRSVVLRSRLXTVGRRLSQRFGFGYFLPLGRGRPAYRYLSRHRARRHGVRPDAAHLLAAGRGPARCGSAYSAGRTYSGRCRKTARLNGFRRPRSI

SEQ ID NO: 2956 - protein, 212 aa, Neisseria
MKQIPLRLLQVVIDHDKVEQYGLFDFMPCLRQPPLDNFPTVRPAPFEARGKHVERRRQDKDTDSFRQRVANLRRALNVDFQNHVIACRRQRIHALRACAVIVAEYVCVFQKSLLRDKRFKLFFGNKVIMYAVCFAFTRRARRMRHGNAQTVMVCQQPRHQRGFARAGSGRNDKDVAFSISGHIFYLYIFQPIVSQRTPYFIFADAHILPLLF

SEQ ID NO: 2957 - protein, 212 aa, Neisseria
MAQILLRSRQVVIDHDKVKQYGLLDFMPCLRQPPLDNFPTVRPASVEARGKYVERRRQDKDADGFGQRVANLRRALNVDFQNHVIACRRQRIHTLRACAVIVAKYVGVFQKSFLRDKRLKLFFGNKVIMYAVCFAFTRRARRVRHGNAQTVMVCQQPRHQRGFARAGSGRNDKDVAFSISGHIFYLYIFQPIVSQWTPSFLFADAHILPLLF

SEQ ID NO: 2958 - protein, 212 aa, Neisseria
MAQILLRPRQVIIDHDKIEQYGLFDFMPCLRQPPLDNFPTVRPASVETRSKHIERRRQDKDADGFGQRISNLSRALNVDFQNHVITCRRQRIHTLRACAVIVAEHVRVFQKSLLRDKRLKLFFGNKVIMYAVCFAFTRRTRRVRHGNAQTVMVCQQPRHQRGFARAGSGRNDKDVAFSISGHIFYLYIFQPIVSQRTPGFLFADAHILPLLF

SEQ ID NO: 2959 - protein, 174 aa, Neisseria
MRREAKMAQITLKPIVLSILLINTPLLAQAHETEQSVGLETVSVVGKSRPRATSGLLHTSTASDKIISGDTLRQKAVNLGDALDGVPGIHASQYGGGASAPVIRGQTGRRIKVLNHHGETGDMADFSPDHAIMVDTALSQQVEILRGPVTLLYSSGNVAGAGQCCRWKNPPKNA

SEQ ID NO: 2960 - protein, 735 aa, Neisseria
PHKTEQSVDLETVSVVGKSRPRATSGLLHTSTASDKIISGDTLRQKAVNLGDALDGVPGIHASQYGGGASAPVIRGQTGRRIKVLNHHGETGDMADFSPDHAIMVDTALSQQVEILRGPVTLLYSSGNVAGLVDVADGKIPEKMPENGVSGELGLRLSSGNLEKLTSGGINIGLGKNFVLHTEGLYRKSGDYAVPRYRNLKRLPDSHADSQTGSIGLSWVGEKGFIGVAYSDRRDQYGLPAHSHEYDDCHADIIWQKSLINKRYLQLYPHLLTEEDIDYDNPGLSCGFHDDDNAHAHTHSGRPWIDLRNKRYELRAEWKQPFPGFEALRVHLNRNDYRHDEKAGDAVENFFNNQTQNARIELRHQPIGRLKGSWGVQYLQQKSSALSAISEAVKQPMLLDNKVQHYSFFGVEQANWDNFTLEGGVRVEKQKASIQYDKALIDRENYYNHPLPDLGAHRQTARSFALSGNWYFTPQHKLSLTASHQERLPSTQELYAHGKHVATNTFEVGNKHLNKERSNNIELALGYEGDRWQYNLALYRNRFGNYIYAQTLNDGRGPKSIEDDSEMKLVRYNQSGADFYGAEGEIYFKPTPRYRIGVSGDYVRGRLKNLPSLPGREDAYGNRPFIAQDDQNAPRVPAARLGFHLKASLTDRIDANLDYYRVFAQNKLARYETRTPGHHMLNLGANYRRNTRYGEWNWYVKADNLLNQSVYAHSSFLSDTPQMGRSFTGGVNVKF

SEQ ID NO: 2961 - protein, 764 aa, Neisseria
MRREAKMAQTTLKPIVLSILLINTPLLSQAHGTEQSVGLETVSVVGKSRPRATSGLLHTSTASDKIISGDTLRQKAVNLGDALDGVPGIHASQYGGGASAPVIRGQTGRRIKVLNHHGETGDMADFSPDHAIMVDSALSQQVEILRGPVTLLYSSGNVAGLVDVADGKIPEKMPENGVSGELGLRLSSGNLEKLTSGGINIGLGKNFVLHTEGLYRKSGDYAVPRYRNLKRLPDSHADSQTGSIGLSWVGEKGFIGAAYSDRRDQYGLPAHSHEYDDCHADIIWQKSLINKRYLQLYPHLLTEEDIDYDNPGLSCGFHDDDDAHAHAHNGKPWIDLRNKRYELRAEWKQPFPGFEALRVHLNRNDYRHDEKAGDAVENFFNNQTQNARIELRHQPIGRLKGSWGVQYLGQKSSALSATSEAVKQPMLLDNKVQHYSFFGVEQANWDNFTLEGGVRVEKQKASIRYDKALIDRENYYNHPLPDLGAHRQTARSFALSGNWYFTPQHKLSLTASHQERLPSTQELYAHGKHVATNTFEVGNKHLNKERSNNIELALGYEGDRWQYNLALYRNRFGNYIYAQTLNDGRGPKSIEDDSEMKLVRYNQSGADFYGAEGEIYFKPTPRYRIGVSGDYVRGRLKNLPSLPGREDAYGNRPLIAQADQNAPRVPAARLGVHLKASLTDRIDANLDYYRVFAQNKLARYETRTPGHHMLNLGANYRRNTRYGEWNWYVKADNLLNQSVYAHSSFLSDTPQMGRSFTGGVNVKF

SEQ ID NO: 2962 - protein, 199 aa, Neisseria
MALKTSNLEHAMLVHPEAMSVGALADKIRKIENWPQKGILFHDITPVLQSAEYFRLLVDLLVYRYMDQKIDIVAGLDARGFIIGAALAYQLNVGFVPIRKKGKLPFETVSQSYALEYGEAAVEIHTDAVKPGSRVLLVDDLVATGGTMLAGLELIRKLGGEIVEAAAILEFTDLQGGKNIRASGAPLFTLLQNEGCMKG

SEQ ID NO: 2963 - protein, 199 aa, Neisseria
MALKTSNLEHAMLVHPEAMSVGALADKIRKIENWPQKGILFHDITPVLQSAEYFRLLVDLLVYRYMDQKIDIVAGLDARGFIIGAALAYQLNVGFVPIRKKGKLPFETVSQSYALEYGEAAVEIHTDAVKLGSRVLLVDDLIATGGTMLAGLELIRKLGGEIVEAAAILEFTDLQGGKNIRASGAPLFTLLQNEGCMKG

SEQ ID NO: 2964 - protein, 199 aa, Neisseria
MALKTSNLEHAMLVHPEAMSVGALADKIRKIENWPQKGILFHDITPVLQSAEYFRLLVDLLVYRYMDQKIDIVAGLDARGFIIGAALAYQLNVGFVPIRKKGKLPFETVSQSYALEYGEAAVEIHTDAVKLGSRVLLVDDLVATGGTMLAGLELIRKLGGEIVEAAAILEFTDLQGGKNIRASGAPLFTLLQNEGCMKG

SEQ ID NO: 2965 - protein, 339 aa, Neisseria
MLIDNNVRHYSFFGVEQANWDNFTLEGGVRVEKQKASIRYDKALIDRENYYNQPLPDLGAHRQTARSFALSGNWYFTPHHKLSLTASHQERLPSTQELYAHGKHVATNTFEVGNKHLNKERSNNIELALGYKGDRWQYNLAAYRNRFGNYIYAQTLNDGRGPKSIEDDSEMKLVRYNQSGADFYGAEGEIYFKPTPRYRIGVSGDYVRGRLKNLPSLPGREDPYGKRPFIAQADQNAPRIPAARLGFHLKTSLTDRIDANLDYYRVFAQNKLARYETRTPGHHMLNLGANYRRNTRYGEWNWYVKADNLLNQSVYAHSSFLSDTPQMGRSFAGGVNVKF

SEQ ID NO: 2966 - protein, 339 aa, Neisseria
MLLDNKVQHYSFFGVEQANWDNFTLEGGVRVEKQKASIQYDKALIDRENYYNHPLPDLGAHRQTARSFALSGNWYFTPQHKLSLTASHQERLPSTQELYAHGKHVATNTFEVGNKHLNKERSNNIELALGYEGDRWQYNLALYRNRFGNYIYAQTLNDGRGPKSIEDDSEMKLVRYNQSGADFYGAEGEIYFKPTPRYRIGVSGDYVRGRLKNLPSLPGREDAYGNRPFIAQDDQNAPRVPAARLGFHLKASLTDRIDANLDYYRVFAQNKLARYETRTPGHHMLNLGANYRRNTRYGEWNWYVKADNLLNQSVYAHSSFLSDTPQMGRSFTGGVNVKF

SEQ ID NO: 2967 - protein, 339 aa, Neisseria
MLLDNKVQHYSFFGVEQANWDNFTLEGGVRVEKQKASIRYDKALIDRENYYNHPLPDLGAHRQTARSFALSGNWYFTPQHKLSLTASHQERLPSTQELYAHGKHVATNTFEVGNKHLNKERSNNIELALGYEGDRWQYNLALYRNRFGNYIYAQTLNDGRGPKSIEDDSEMKLVRYNQSGADFYGAEGEIYFKPTPRYRIGVSGDYVRGRLKNLPSLPGREDAYGNRPLIAQADQNAPRVPAARLGVHLKASLTDRIDANLDYYRVFAQNKLARYETRTPGHHMLNLGANYRRNTRYGEWNWYVKADNLLNQSVYAHSSFLSDTPQMGRSFTGGVNVKF

SEQ ID NO: 2968 - protein, 758 aa, Neisseria
MAQITLKPIVLSILLINTPLLAQAHETEQSVGLETVSVVGKSRPRATSGLLHTSTASDKIISGDTLRQKAVNLGDALDGVPGIHASQYGGGASAPVIRGQTGRRIKVLNHHGETGDMADFSPDHAIMVDTALSQQVEILRGPVTLLYSSGNVAGLVDVADGKIPEKMPENGVSGEAGLRLSSGNLEKLTSAGINIGLGKNFVLHTEGLYRKSGDYAVPRYRNLKRLPDSHADSQTGSIGLSWVGEKGFIGAAYSDRRDRYGLPAHSHEYDDCHADIIWQKSLINKRYLQLYPHLLTEEDIDYDNPGLSCGFHDGDGAHAHTHNGKPWIDLRNKRYELRAEWKQPFPGFEALRVHLNRNDYHHDEKAGDAVENFFNNKTHNARIELRHQPIGRLKGSWGVQYLGQKSSALSAIPETVQQPMLIDNNVRHYSFFGVEQANWDNFTLEGGVRVEKQKASIRYDKALIDRENYYNQPLPDLGAHRQTARSFALSGNWYFTPHHKLSLTASHQERLPSTQELYAHGKHVATNTFEVGNKHLNKERSNNIELALGYEGDRWQYNLAAYRNRFGNYIYAQTLNDGRGPKSIEDDSEMKLVRYNQSGADFYGAEGEIYFKPTPRYRIGVSGDYVRGRLKNLPSLPGREDPYGKRPFIAQADQNAPRIPAARLGFHLKTSLTDRIDANLDYYRVFAQNKLARYETRTPGHHMLNLGANYRRNTRYGEWNWYVKADNLLNQSVYAHSSFLSDTPQMGRSFTGGVNVKF

SEQ ID NO: 2969 - protein, 758 aa, Neisseria; identical to SEQ ID NO: 1534

SEQ ID NO: 2970 - protein, 758 aa, Neisseria
MAQTTLKPIVLSILLINTPLLSQAHGTEQSVGLETVSVVGKSRPRATSGLLHTSTASDKIISGDTLRQKAVNLGDALDGVPGIHASQYGGGASAPVIRGQTGRRIKVLNHHGETGDMADFSPDHAIMVDSALSQQVEILRGPVTLLYSSGNVAGLVDVADGKIPEKMPENGVSGELGLRLSSGNLEKLTSGGINIGLGKNFVLHTEGLYRKSGDYAVPRYRNLKRLPDSHADSQTGSIGLSWVGEKGFIGAAYSDRRDQYGLPAHSHEYDDCHADIIWQKSLINKRYLQLYPHLLTEEDIDYDNPGLSCGFHDDDDAHAHAHNGKPWIDLRNKRYELRAEWKQPFPGFEALRVHLNRNDYRHDEKAGDAVENFFNNQTQNARIELRHQPIGRLKGSWGVQYLGQKSSALSATSEAVKQPMLLDNKVQHYSFFGVEQANWDNFTLEGGVRVEKQKASIRYDKALIDRENYYNHPLPDLGAHRQTARSFALSGNWYFTPQHKLSLTASHQERLPSTQELYAHGKHVATNTFEVGNKHLNKERSNNIELALGYEGDRWQYNLALYRNRFGNYIYAQTLNDGRGPKSIEDDSEMKLVRYNQSGADFYGAEGEIYFKPTPRYRIGVSGDYVRGRLKNLPSLPGREDAYGNRPLIAQADQNAPRVPAARLGVHLKASLTDRIDANLDYYRVFAQNKLARYETRTPGHHMLNLGANYRRNTRYGEWNWYVKADNLLNQSVYAHSSFLSDTPQMGRSFTGGVNVKF

SEQ ID NO: 2971 - protein, 369 aa, Neisseria
YCKADPFPAALLANQKITARQSDKDVRHIEIDLSGSDLHYLPGDALGVWFDNDPALVGEILDLLGINPATEIQAGGKTLPVASALLSHFELTQNTPAFVKGYATFADNDELDRIAADNAVLQGFVQSTPIAGVLHRFPAKLTAEQFAGLLRPLAPRLYSISSSQAEAGDEVHLTVGAVRFEHEGRARAGGASGFFADRLEEDGTVRVFAERNDGFRLPEDSRKPIVMIGSGTGVAPFRAFVQQRAAENAEGRNWLIFGNPHFAADFLYQTEWQQFAKDGFLHRYDFAWSRDQEEKIYVQDKIREQAEGLWQWLQEGAHIYVCGDAAKMAKEVEAALLDVIIGAGHSDEDGAEGYLDMLREEKRYQRDVY

SEQ ID NO: 2972 - protein, 599 aa, Neisseria
MQNTNPPLPPLPPEITQLLSGLDAAQWAWLSGYAWAKAGNGASAGLPALQTALPAAEPFSVTVLSASQTGNAKSVADKAADSLEAAGIQVSRAELKDYKAKNIAGERRLLLVTSTQGEGEPPKEAVVLHKLLNGKKAPKLDKLQFAVLGLGDSSYPNFCQAGKDFDRRFEELGAKRLLERVDADLDFTASANAWTDNIAALLKEEAAKNRATPAPQTTPPAGLQTAPDGRYCKAAPFPAALLANQKITARQSDKDVRHIEIDLSGSDLHYLPGDALGVWFDNDPALVREILDLLGIDPATEIQAGGKMMPVARALSSHFELTQNTPAFVKGYAAFAHYEELDKIIADNAVLQDFVQNTPIVDVLHRFPASLTAEQFIRLLRPLAPRLYSISSAQAEVGDEVHLTVGVVRFEHEGRARTGGASGFLADRLEEDGTVRVFVERNDGFRLPEDSRKPIVMIGSGTGVAPFRAFVQQRAAENAEGKNWLIFGNPHFARDFLYQTEWQQFAKDGFLHRYDFAWSRDQEEKIYVQDKIREQAEGLWQWLQEGAHIYVCGDAAKMAKDVEAALLDVIIGAGHLDEEGAEEYLDMLREEKRYQRDVY

SEQ ID NO: 2973 - protein, 599 aa, Neisseria
MQNTNPPLPPMPPEITQLLSGLDAAQWAWLSGYAWAKAGNGASAGLPALQTALPTAEPFSVTVLSASQTGNAKSVADKAADSLEAAGIQVSRAELKDYKAKNIAGERRLLLVTSTQGEGEPPEEAVVLHKLLNGKKAPKLDKLQFAVLGLGDSSYPNFCRAGKDFDKRFEELGAKRLLERVDADLDFAAAADGWTDNIAALLKEEAAKNRATPAPQTTPPAGLQTAPDGRYCKADPFPAALLANQKITARQSDKDVRHIEIDLSGSDLHYLPGDALGVWFDNDPALVREILDLLGIDQATEIQAGGKTLPVASALLSHFELTQNTPAFVKGYAPFADDDELDRIAADNAVLQGFVQSTPIADVLHRFPAKLTAEQFAGLLRPLAPRLYSISSSQAEVGDEVHLTVGAVRFEHEGRARAGGASGFLADRLEEDGTVRVFVERNDGFRLPEDSRKPIVMIGSGTGVAPFRAFVQQRAAENAEGKNWLFFGNPHFARDFLYQTEWQQFAKDGFLHRYDFAWSRDQEEKIYVQDKIREQAEGLWQWLQEGAHIYVCGDAAKMAKDVEAALLDVIIGAGHLDEEGAEEYLDMLREEKRYQRDVY

SEQ ID NO: 2974 - protein, 603 aa, Neisseria
MKQIRNIAIIAHVDHGKTTLVDQLLRQSGTFRANQQVDERVMDSNDLEKERGITILAKNTAIDYEGCHINIVDTPGHADFGGEVERVLGMVDCVVLLVDAQEGPMPQTRFVTKKALALGLKPIVVINKIDKPSARPSWVIDQTFELFDNLGATDEQLDFPIVYASGLSGFAKLEETDESSDMRPLFDTILKYTPAPSGSADEPLQLQISQLDYDNYTGRLGIGRILNGRIKPGQTVAVMNHEQQIAQGRINQLLGFKGLERVPLEEAEAGDIVIISGIEDIGIGVTITDKDNPKGLPMLSVDEPTLTMDFMVNTSPLAGTEGKFVTSRQIRDRLQKELLTNVALRVEDTADADVFRVSGRGELHLTILLENMRREGYELAVGKPRVVYRDIDGQKCEPYENLTVDVPDDNQGAVMEELGRRRGELTNMESDGNGRTRLEYHIPARGLIGFQGEFMTLTRGVGLMSHVFDDYAPVKPDMPGRHNGVLVSQEQGEAVAYALWNLEDRGRMFVSPNDKIYEGMIIGIHSRDNDLVVNPLKGKKLTNIRASGTDEAVRLTTPIKLTLEGAVEFIDDDELVEITPQSIRLRMRYLSELERRRHFKKLD

SEQ ID NO: 2975 - protein, 603 aa, Neisseria; identical to SEQ ID NO: 1755

SEQ ID NO: 2976 - protein, 603 aa, Neisseria
MKQIRNIAIIAHVDHGKTTLVDQLLRQSGTFRANQQVDERVMDSNDLEKERGITILAKNTAIDYEGYHINIVDTPGHADFGGEVERVLGMVDCVVLLVDAQEGPMPQTRFVTKKALALGLKPIVVINKIDKPSARPSWVIDQTFELFDNLGATDEQLDFPIVYASGLSGFAKLEETDESNDMRPLFDTILKYTPAPSGSADETLQLQISQLDYDNYTGRLGIGRILNGRIKPGQVVAVMNHDQQIAQGRINQLLGFKGLERVPLEEAEAGDIVIISGIEDIGIGVTITDKDNPKGLPMLSVDEPTLTMDFMVNTSPLAGTEGKFVTSRQIRDRLQKELLTNVALRVEDTADADVFRVSGRGELHLTILLENMRREGYELAVGKPRVVYRDIDGQKCEPYENLTVDVPDDNQGAVMEELGRRRGELTNMESDGNGRTRLEYHIPARGLIGFQGEFMTLTRGVGLMSHVFDDYAPVKPDMPGRHNGVLVSQEQGEAVAYALWNLEDRGRMFVSPNDKIYEGMIIGIHSRDNDLVVNPLKGKKLTNIRASGTDEAVRLTTPIKLTLEGAVEFIDDDELVEITPQSIRLRKRYLSELERRRHFKKLD

SEQ ID NO: 2977 - protein, 218 aa, Neisseria
MKNKTKVWDFPTRLFHWLLAASLPFMWYSAKAGGDMLQWHTRVGLLVLFLLVFRLCWGIWGSDTARFSRFVRGWAGIRGYLKNGIPEHIQPGHNPLGALMVVALLAAVSFQVGTGLFAANENTFSTNGYLNHLVSEHTGSLIRKIHLNFFKLLAVFSAVHIAAVAAYRIFKKKNLVRPMITGFKYIEGKTSIRFAGKAALAAALSVAALAAAAILLLS

SEQ ID NO: 2978 - protein, 218 aa, Neisseria; identical to SEQ ID NO: 1716

SEQ ID NO: 2979 - protein, 218 aa, Neisseria
  VARIANT (1)...(218): Xaa = Any Amino Acid
MKNKTKVWDFPTRLFHWLLAASLPFMWYSAKTGGDMLQWHTRVGLFILFLLVFRLCWGIWGSDTARFSRFVRGWSGIREYMKNGIPEHVQPGHNPLGALMVVALLAAVSFQVGTGLFAADVNTFSTNGYLNHLVSEHTGSLMRKIHLNFFKLLAVFSAVHIAXVAAYRVFKKKNLVLPMITGFKYIEGKTSIRFAGKAALAAALSVAALAAAAILLLS

SEQ ID NO: 2980 - protein, 358 aa, Neisseria
MGFAYSMTYIEVGIPEAASVLSLPEMMRLMVFQDYGFLAEVMFVLTFGAPVLFLLLCLYVYAALIRKQAYPALRLATRVMVRLRQAMMVDVFFVSTLVAYIKLSSVAKVRFGPAFYLMFALSVMLIRTSVSVPQHWVYFQIGRLTGNNAVQTASEGKTCCSRCLYFRDSAESPCGVCGAELYGGRPKSLSISSAFLTAAVVLYFPANILPIMISSNPAATEANTIFSGIAYMWDEGDRLIAAVIFSASILVPVLKIAAMSVLIAAARFALPAGAKKLSHLYRITEAVGRWSMIDIFVIIILMCSFHTYAARVIPGSAAVYFCLVVILTMLSAYYFDPRLLWDKRASDGIAFNETEKYD

SEQ ID NO: 2981 - protein, 358 aa, Neisseria
MAFAYGMTYIEVGIPGAASVLSLPEMMRLMVFQDYGFLAEVMFVLTFGAPVLFLLLCLYVYAALIRKQAYPALRLATRVMVRLRQAMMVDVFFVSTLVAYIKLSSVAEVRFGPAFYLMFALSVMLIRTSVSVPQHWVYFQIGRLTGDNAVQTASEGKTCCSRCLYFRDSAESPCGVCGAELYRRRPKSLSISSAFLTAAVILYFPANILPIMISSNPAATEVNTILNGIAYMWDEGDRLIAAVIFSASILVPVLKIAAMSVLIASARFALPTGAKKLSHLYRITEAVGRWSMIDIFVIIILMCSFHTYAARVIPGSAAVYFCLVVILTMLSAYYFDPRLLWDKRASDGIAFNETEKHD

SEQ ID NO: 2982 - protein, 358 aa, Neisseria
MAFAYGMTYIEVGIPGAASVLSLPEMMRLMVFQDYGFLAEVMFVLTFGAPVLFLLLCLYVYAALIRKQAYPALRLATRVMVRLRQAMMVDVFFVSTLVAYIKLSSVAEVRFGSAFYLMFALSVMLIRTSVSVPQHWVYFQIGRLTGDNAVQTASEGKTCCSRCLYFRDSAESPCGVCGAELYRRRPKSLSISSAFLTAAVILYFPANILPIMISSNPAATEVNTILNGIAYMWDEGDRLIAAVIFSASILVPVLKIAAMSVLIASARFALPTGAKKLSHLYRITEAVGRWSMIDIFVIIILMCSFHTYAARVIPGSAAVYFCLVVILTMLSAYYFDPRLLWDKRASDGIAFNETEKHD

SEQ ID NO: 2983 - protein, 553 aa, Neisseria
MTDNSPPPNGHAQARVRKNNTFLSAVWLVPLIALIAGGWLWVKEIRNRGPVVTLLMDSAEGIEVNNTVIKVLSIDVGRVTRIKLRDDQKGVEVTAQLNADVSGLIRSDTQFWVVKPRIDQSGVTGLGTLLSGSYIAFTPGKSGEAKDVFQVQDIPPVTAIGQSGLRLNLIGKNDRILNVNSPVLYENFMVGQIESAHFDPSDQSVHYTIFIQSPNDKLIHSASRFWLESGINIETTGSGIKLNSAPLPALLSGAISFDSPKTKNSKNVKSEDSFTLYDSRSEIANLPDDRSLYYTAFFKQSVRGLTVGSPVEYKGLNVGMVSDVPYFDRNDSLHLFENGWIPVRIRIEPSRLEINADEQSKEHWKQQFQTALNKGLTATISSNNLLTGGKMIELNDQPSASPKLRPHTVYAGDTVIATRGGGLDDLQVKLADLLDKFNNLPLDKTVAELNGSLAELKSALKSANAALSSIDKLVGNPQTQNIPNELNQTLKELRITLQGVSPQSPIYGDVQNTLQSLDKTLKDVQPVINTLKEKPNALIFNNSSKDPIPKGSR

SEQ ID NO: 2984 - protein, 553 aa, Neisseria; identical to SEQ ID NO: 2205

SEQ ID NO: 2985 - protein, 553 aa, Neisseria; identical to SEQ ID NO: 2205

SEQ ID NO: 2986 - protein, 512 aa, Neisseria
MKIGIPRESLSGETRVACTPATVALLGKLGFETVVESGAGLAASLDDAAYQTAGATVADKAAVWACPLIYKVNAPSEGELPLLKEGQTIVSFLWPRQNEALVEALRAKKVNALAMDMVPRISRAQALDALSSMANISGYRAVIEAANAFGRFFTGQITAAGKVPPAQVLVIGAGVAGLAAIGTANSLGAVVRAFDTRLEVAEQIESMGGKFLKLDFLQESGGSGDGYAKVMSDEFIAAEMKLFAEQAKEVDIIITTAAIPGKPAPKLITKEMVESMKSGSVIVDLAATGGNCELTRPGELSVTGNGVKIIGYTDMANRLAGQSSQLYATNLVNLTKLLSPNKDGEITLDFEDVIIRNMTVTRDGEITFPPPPIQVSARPQQTPSEKAAPAAKPEPKPVPLWKKLAPAAIAAVLVLWVGAVAPAAFLNHFIVFVLACVIGYHVVWNVSHSLHTPLMSVTNAISGIMVVGALLQIGQGNGFVSLLSFVAILIAGINIFGGFAVTRRMLNMFKKG

SEQ ID NO: 2987 - protein, 513 aa, Neisseria; identical to SEQ ID NO: 1549

SEQ ID NO: 2988 - protein, 513 aa, Neisseria
  VARIANT (1)...(513): Xaa = Any Amino Acid
MKIGIPRESLSGETRVACTPATVALLGKLGFETVVESGAGLAASLDDAAYQAAGATVADKAAVWAYPLIYKVNAPSEDELPLLKEGQTIVSFLWPRQNEALVEALRAKKVNALAMDMVPRISRAQALDXLSXMANISGYRAVIEAANAFGRXFTGQITAAGKVPPAQVLVIGAGVAGLAAIGTANSLGAVVRVFDTRLXVAEQLESMGGKFLKLDFPQESGGSGDGYAKVMSDEFIAAEMKLFAEQAKEVDIIITTAAIPGKPAPKXXXKEMVESMKPGSVIVDLAAATGGNCELTKQGELFVTGNGVKIIGYTDMANRLAGQSSQLYATNLVNLTKLLSPNKDGEITLDFEDVIIRNMTVTRDGEITFPPPPIQVSAQPQQTPSEKAAPAAKPEPKPVPLWKKLAPAXIAAVLVLWVGAVAPAAFLNHFIVFVLACVIGYYVVWNVSHSLHTPLMSVTNAISGIIVVGALLQIGQGNGFVSLLSFVAILIASINIFGGFFVTRRMLNMFRKG

SEQ ID NO: 2989 - protein, 127 aa, Neisseria
MTFAYWCILIACLLPLFCAAYAKKAGGFRFKDNHNPRGFLAHTQGAAARAHAAQQNGFEAFAPFAAAVLTAHATGNAGQATVNTLAGLFILFRLAFIWCYIADKAALRSLMWAGGFACTVGLFVAAA

SEQ ID NO: 2990 - protein, 127 aa, Neisseria; identical to SEQ ID NO: 1548

SEQ ID NO: 2991 - protein, 127 aa, Neisseria
MTFAYWCILIAYLLPLFCAAYAKKAGGFRFKDNHNPRDFLARTQGTAARAHAAQQNGFEAFAPFAAAVLTAHATGNAGQATVNTLAGLFILFRLAFIWCYIADKAALRSLMWVGGFVCTVGLFVVAA

SEQ ID NO: 2992 - protein, 193 aa, Neisseria
MRNEEKRALRRELRGRRSQMGRDVRAAAAIKINRLLKRYIKRGRKIGVYWPMGKELRLGGFVRAAQKRGAKLYLPYIEPHTRRMWFTPYPERGMERERKRGRAKLHVPQFAGRKIRVHGLSVLLVPLVGIDREGYRLGQAGGYYDATLSAMKYRLQAKTVGVGFACQLVDRLPREAHDLPLDGFVSEAGILCF

SEQ ID NO: 2993 - protein, 193 aa, Neisseria; identical to SEQ ID NO: 2611

SEQ ID NO: 2994 - protein, 193 aa, Neisseria
MRNEEKHALRRELRRARAQMGHQGRLAAGQTINRLLKRYIKRGRKIGVYWPMGKELRLDGFVRAAQKRGAKLYLPYIEPRSRRMWFTPYPESGMERERIRGRAKLNVPQFAGRKIRVHGLSVLLVPLVGIDREGYRLGQAGGYYDATLAAMKYRLQAKTVGVGFACQFVDRLPREPHDLLLDGFVSEAGILCF

SEQ ID NO: 2995 - protein, 303 aa, Neisseria
MKTNSEELTVFVQVVESGSFSRAAEQLEMANSAVSRIVKRLEEKLGVNLLNRTTRQLNLTEEGAQYFRRAQRILQEMAAAETEMLAVHEVPQGVLRVDSAMPMVLHLLAPLAAKFNERYPHIRLSLVSSEGYINLIERKVDIALRAGELDDSGLRARHLFDSHFRVVASPEYLAKHGTPQSAEDLANHQCLGFTEPGSLNTWAVLDAQGNPYKISPHFTASSGEILRSLCLSSCGIACLSDFLVDNDITEGKLIPLFAEQTSNKTHPFNAVYYSDKAVNLRLRVFLDFLVKELGKNMNRTNTK

SEQ ID NO: 2996 - protein, 299 aa, Neisseria; identical to SEQ ID NO: 2376

SEQ ID NO: 2997 - protein, 299 aa, Neisseria
MKTNSEELTVFVQVVESGSFSRAAEQLAMANSAVSRIVKRLEEKLGVNLLNRTTRQLSLTEEGAQYFRRAQRILQEMAAAETEMLAVHEIPQGVLRVDSAMPMVLHLLAPLAAKFNERYPHIRLSLVSSEGYINLIERKVDIALRAGELDDSGLRARHLFDSRFRVIASPEYLAKHGTPQSTEELAGHQCLGFTEPGSLNTWAVLDAQGNPYKISPHFTASSGEILRSLCLSGCGIACLSDFLVDNDIAEGKLIPLLAEQTSNKTHPFNAVYYSDKAVNLRLRVFLDFLVEELGNNLCG

SEQ ID NO: 2998 - protein, 298 aa, Neisseria
MDILDKLVDLAQLTGSADVQCLLGGQWHETLQREGLVHIVTAGSGYLCIDGETSPRPVGTGDIVFFPRGLGHVLSHDGKYGESLQPDIRQNGTFMVKQCGNGLDMSLFCARFRYDTHADLMNGLPETVFLNIAHPSLQYVVSMLQLESEKPLTGTVSVVNALPSVLLVLILRAYLEQDKDVELSGVLKGWQDKRLGHLIQKVIDKPEDEWNIDKMVAAANMSRAQLMRRFKSQVGLSPHAFVNHIRLQKGALLLKKTPDSVLEVALSVGFQSETHFGKAFKRQYHVSPGQYRKEGGQK

SEQ ID NO: 2999 - protein, 301 aa, Neisseria; identical to SEQ ID NO: 2126

SEQ ID NO: 3000 - protein, 301 aa, Neisseria; identical to SEQ ID NO: 2126

SEQ ID NO: 3001 - protein, 300 aa, Neisseria; identical to SEQ ID NO: 274

SEQ ID NO: 3002 - protein, 300 aa, Neisseria; identical to SEQ ID NO: 271
  VARIANT (1)...(300): Xaa = Any Amino Acid

SEQ ID NO: 3003 - protein, 300 aa, Neisseria; identical to SEQ ID NO: 272

SEQ ID NO: 3004 - protein, 660 aa, Neisseria
MVILTTLFFVCVLVVLVLTVPDQVQMWLDRAKEVIFTEFSWFYVLTFSIFLGFLLILSVSGLGNIRLGRDEDVPEFGFLSWLAMLFAAGMGVGLMFFGVAEPLMHYFSDITVGAPEHRQQQALLHTVFHWGVHAWSVYGTIALALAYFGFRYKLPLALRSCFYPLLKEKISGRFGDAIDIMALLATFFGIITTLGFGASQLGAGLQEMGWIAENSFGVQVLIIAAVMSLAVVSAISGVGKGVKVLSELNLGLAFLLLFFVLAADPTVYLLSAFGDNIGNYLGNLVRLSLKTYAYEREHKPWFESWTVLYWAWWCSWAPFVGLFIARISKGRTIREFVFGVLLIPGLFGVLWFTVFGNTAIWLNDGVAGGMLEKMTSSPETLLFKFFNYLPLPELTSIVSLLVISLFFVTSADSGIYVLNNITSRDKGLSAPRWQAVMWGVLMSAVAVLLMRSGGLGNLQSMTLIVSLPFALLMLIMCFSLWKGLSADKKYFETRVNPTSVFWTGGKWKERLVRIMSQTQEQDILKFLKHTASPAMHELQRELSEEYGLSVRVDKMFHQDEPAIEFVIRKETMRDFMYGIKSVGQDVSDQLINDGKLPHIRHQTTYKPYAYFFDGRVGYDVQYMNKDELIADILKNYERYLMLLDDVGQELMAHEQVELAE

SEQ ID NO: 3005 - protein, 660 aa, Neisseria
MVILTTLFFVCVLVVLVLTVPDQVQMWLDRAKEVIFTEFSWFYVLTFSIFLGFLLILSVSSLGNIRLGRDEDVPEFGFLSWLAMLFAAGMGVGLMFFGVAEPLMHYFSDITAGTPEHRQQQALLHTVFHWGVHAWSVYGTIALALAYFGFRYKLPLALRSCFYPLLKEKISGRFGDAIDIMALLATFFGIITTLGFGASQLGAGLQEMGWIAENSFSVQVLIIAAVMSLAVVSAISGVGKGVKVLSELNLGLAFLLLFFVLAAGPTVYLLSAFGDNIGNYLGNLVRLSFKTYAYEREHKPWFESWTVLYWAWWCSWAPFVGLFIARISKGRTIREFVFGVLLIPGLFGVLWFTVFGNTAIWLNDGVAGGMLEKMTSSPETLLFKFFNYLPLPELTSIVSLLVISLFFVTSADSGIYVLNNITSRDKGLSAPRWQAVMWGVLMSAVAVLLMRSGGLGNLQSMTLIVSLPFALLMLIMCFSLWKGLSADKKYFETRVNPTSVFWTGGKWKERLVQIMSQTQEQDILKFLKQTASPAMHELQRELSEEYGLSVRVDKMFHRDEPAIEFVIRKETMRDFMYGIKSVGQDVSDQLINDGKLPHIRHQTTYKPYAYFFDGRVGYDVQYMNKDELIADILKNYERYLMLLDDVGQELMAHEQVELAE

SEQ ID NO: 3006 - protein, 660 aa, Neisseria
MVILTTLFFVCVLVVLVLTVPDQVQMWLDRAKEVIFTEFSWFYVLTFSIFLGFLLILSVSSLGNIRLGRDEDVPEFGFLSWLAMLFAAGMGVGLMFFGVAEPLMHYFSDITAGTPEHRQQQALLHTVFHWGVHAWSVYGTIALALAYFGFRYKLPLALRSCFYPLLKEKISGRFGDAIDIMALLATFFGIITTLGFGASQLGAGLQEIGWIAENSFSVQVLIIAAVMSLAVVSAISGVGKGVKVLSELNLGLAFLLLFFVLAAGPTVYLLSAFGDNIGNYLGNLVRLSFKTYAYEREHKPWFESWTVLYWAWWCSWAPFVGLFIARISKGRTIREFVFGVLLIPGLFGVLWFTVFGNTAIWLNDGVAGGVLEKMTSSPETLLFKFFNYLPLPELTSIVSLLVISLFFVTSADSGIYVLNNITSRDKGLSAPRWQAVMWGVLMSAVAVLLMRSGGLGNLQSMTLIVSLPFALLMLIMCFSLWKGLSADKKYFETRVNPTSVFWTGGKWKERLVQIMSQTQEQDILKFLKHTASPAMHELQRELSEEYGLSVRVDKMFHQDEPAIEFVIRKETMRDFMYGIKSVGQDVSDQLINDGKLPHIRHQTTYKPYAYFFDGRVGYDVQYMNKDELIADILKNYERYLMLLDDVGQELMAHEQVELAE

SEQ ID NO: 3007 - protein, 432 aa, Neisseria
MNTFLKNSEYAYILNDCKARFLFASAGLSKELAGLKAQTPVEKIIWTDKSRPAGETAEGDAFFENVRRFPEKPDLGRQPRINDLAHIIYTSGTTGHPKGALISYANLFANLNGIERIFKISKRDRFIVFLPMFHSFTLTAMVLLPIYMACSIILVKSVFPFSNVLKQALLKRATVFLGVPAIYTAMSKAKIPWYFRWFNRIRLFISGGAPLAEQTILDFKAKFPRAKLLEGYGLSEASPVVAVNTPERQKARSVGIPLPGLEAKAVDEELVEVPRGEVGELIVRGGSVMRGYLNMPAATDETIVNGWLKTGDFVTIDEDGFIFIVDRKKDLIISKGQNVYPREIEEEIHKLDAVEAAAVIGVKDRYADEEIVAFVQLKEGMDLGEDEIRRHLRTVLANFKIPKQIHFKDGLPRNATGKVLKRVLKEQFEGNK

SEQ ID NO: 3008 - protein, 517 aa, Neisseria; identical to SEQ ID NO: 1825

SEQ ID NO: 3009 - protein, 517 aa, Neisseria
MNRTYANFYEMLTAACRKNGNGTAVFDGKEKTAYRALKQEAEAVAAYLQNIGVKFGDTVALAVSNSTEFITAYFAVSAIGAVAVPMNTFLKNSEYAYILNDCKARFLFASAGLSKELAGLKAQTPVEKIIWTGQSRPDGEMAEGDAFFEDVRRFPEKPDLGRQPRINDLAHIIYTSGTTGHPKGALISYANLFANLNGIERIFKISKRDRFIVFLPMFHSFTLTAMVLLPIYMACSIILVKSVFPFSNVLKQALLKRATVFLGVPAIYTAMSKTKIPWYFRWFNRIRLFISGGAPLAEQTILDFKAKFPRAKLLEGYGLSEASPVVAVNTPERQKARSVGIPLPGLEVKAVDEELVEVPRGEVGELIVRGGSVMRGYLNMPAATDETIVNGWLKTGDFVTIDEDGFIFIVDRKKDLIISKGQNVYPREIEEEIYKLDAVEAAAVIGVKDRYADEEIVAFVQLKEGMDLGENEIRRHLRTVLANFKIPKQIHFKDGLPRNATGKVLKRVLKEQFDGNK

SEQ ID NO: 3010 - protein, 363 aa, Neisseria
MAEATDVVLVGGGIMSATLGVLLKELEPSWEITLIERLEDVALESSNAWNNAGTGHSALCELNYAPLGADGVINPARALNIAEQFHVSRQFWATLVAEGKLEDNSFINAVPHMSLVMNEDHCRYLQKRYDVFKTQKLFENMEFSTDRNKISDWAPLIMRGRDENQPVAANYSAEGTDVDFGRLTRQMVKYLQGKGVKTEFNRHVEDIKRESDGAWVLKTADTRNPDWQLTLRTRFLFLGAGGGALTLLQKSGIPEGKGYGGLPVSGLFFRNSNPETAEQHNAKVYGQASVGAPPMSVPHLDTRNVDGKRHLMFGPYAGFRSNFLKQGSFMDLPLSIHMDNLYPMLRAGWANMPLTKYLLGELR

SEQ ID NO: 3011 - protein, 356 aa, Neisseria
MAEATDVVLVGGGIMSATLGVLLKELEPSWEITLIERLEDVALESSNAWNNAGTGHSALCELNYAPLGANGIIDPARALNIAEQFHVSRQFWATLVAEGKLEDNSFINAVPHMSLVMNEDHCSYLQKRYDAFKTQKLFENMEFSTDRNKISDWAPLMMRGRDENQPVAANYSAEGTDVDFGRLTRQMVKYLQGKGVKTEFNRHVEDIKRESDGAWVLKTADTRNPDGQLTLRTRFLFLGAGGGALTLLQKSGIPEGKGYGGFPVSGLFFRNSNPETAEQHNAKVYGQASVGAPPMSVPHLDTRNVDGKRHLMFGPYAGFRSNFLKQGSLMDLPLSIHMDNLYPMLCAGWANMPLTK

SEQ ID NO: 3012 - protein, 488 aa, Neisseria
MAEATDVVLVGGGIMSATLGVLLKELEPSWEITLIERLEDVALESSNAWNNAGTGHSALCELNYAPLGANGIIDPARALNIAEQFHVSRQFWATLVAEGKLEDNSFINAVPHMSLVMNEDHCSYLQKRYDAFKTQKLFENMEFSTDRNKISDWAPLMMRGRDENQPVAANYSAEGTDVDFGRLTRQMVKYLQGKGVKTEFNRHVEDIKRESDGAWVLKTADTRNPDGQLTLRTRFLFLGAGGGALTLLQKSGIPEGKGYGGFPVSGLFFRNSNPETAEQHNAKVYGQASVGAPPMSVPHLDTRNVDGKRHLMFGPYAGFRSNFLKQGSLMDLPLSIHMDNLYPMLRAGWANMPLTKYLLGELRKTKEERFASLLEYYPEANPDDWELITAGQRVQIIKKDSEKGGVLQFGTEIVAHADGSLAALLGASPGASTAVPLMIRLMHQCFPERTPSWEGRLKELVPGYGIKLNENPERADEIIAYTAKVLDI

SEQ ID NO: 3013 - protein, 445 aa, Neisseria
  VARIANT (1)...(445): Xaa = Any Amino Acid
MAEATDVVLVGGGIMSATLGVLLKELEPSWEITLIERLEDVALESSNAWNNAGTGHSALCELNYAPLGADGVINPARALNIAEQFHVSRQFWATLVAEGKLEDNSFINAVPHMSLVMNEDHCRYLQKRYDVFKTQKLFENMEFSTDRNKISDWAPLIMRGRDENQPVAANYSAEGTDVDFGRLTRQMVKYLQGKGVKTEFNRHVEDIKRESDGAWVLKTADTRNPDWQLTLRTRFLFLGAGGGALTLLQKSGIPEGKGYGGLPVSGLFFRNSNPETAEQHNAKVYGQASVGAPPMSVPHLDTRNVDGKRHLMFGPYAGFRSNFLKQGSFMDLPLSIHMDNLYPMLRAGWANMPLTKYLLGELRKTKEERFASLLEYYPRQTRRLVLITQXTRHIIXYDSKLRVLQLYEIVPRDARSRILERRGASRXALISADDTAPSAPVLESV

SEQ ID NO: 3014 - protein, 488 aa, Neisseria; identical to SEQ ID NO: 2608

SEQ ID NO: 3015 - protein, 488 aa, Neisseria; identical to SEQ ID NO: 3012

SEQ ID NO: 3016 - protein, 250 aa, Neisseria
MAAAEIKRPLAVDFQHIASVLHGGIAAFACLIGLQGGMRNQVISQFAAVFGDIAHQFGKQGMAHAVFRPARRRVLSVGFHTFADDGFQVVGMLSGQPDGVLFRQAFNRITDLFFAVVGFAFATLSQSQTGNRRIVDVFDFENRFRRALCRILRLFRRIFGFAAGGKQQAAAQHGKRYFQHSALLMVSKCRLKCRLKRGRRRFGRHWVYFNGRMPTASRTLSNNSRASLRAFCAPACKISSICEGLEVNAL

SEQ ID NO: 3017 - protein, 245 aa, Neisseria
  VARIANT (1)...(245): Xaa = Any Amino Acid
MAAAEIKRPFAVDFQHIASVLHGGIAAFACLIGLQGGMRNVIRQFAAVFGDIAHQFGKQGMAHAVFCPTCRTVLIIGFHTFAADGFQVAGMLADQSDNILFRQAFNRITDLFFAVVGFAFAALSQIQTGNRRIVDIYDFENRFRRALYRVLRLYRRIXGFAATAXQQAAAQYGKXXXQHSTXLMVSKCRLKRGRRRFGRHRVHFNGRMPTASGTLSNNSRASLRAFAAPACKISSICEGSAVSSL

SEQ ID NO: 3018 - protein, 157 aa, Neisseria
MAAAEIKRPLAVDFQHIASVLHGGIAAFACLIGLQGGMRNQVIRQFAAVFGDIAHQFGKQGMAHAVCRPARRRALSVGFHTFADDGFQVVGMLAGQPDDVLFRQAFKRFGRHWVYFNGRIPTASRTLPNNSRASLRAFCAPACKISSICEGSAVSSL

SEQ ID NO: 3019 - protein, 181 aa, Neisseria; identical to SEQ ID NO: 215

SEQ ID NO: 3020 - protein, 181 aa, Neisseria
  VARIANT (1)...(181): Xaa = Any Amino Acid
MLXTXFAVLGGCLLXCRCGKSXNTAVQPQNAVQSAPKPVFKVIYIDNTAIAGLDLGQSSEGKTNDGKKQISYPIKGLPEQNVIRLIGKHPGDLEAVSGKCMETDDKDSPAGWAENGVCHTLFAKLVGNIAEDGGKLTDYLVSHAALQPYQAGKSGYAAVQNGRYVLEIDSEGAFYFRRRHY

SEQ ID NO: 3021 - protein, 111 aa, Neisseria
SEPLKGLPEQNVVRLTGKHPNDLEAVVGKCMETDGKGAPSGWAANGVCHTLFAKLVGNIAEDGGKLTDYLISHSALQPYQAGKSGYAAVQNGRYVLEIDSEGAFYFRRRHY

SEQ ID NO: 3022 - protein, 174 aa, Neisseria
MLKIPFAVLGGCLLLAACGKSENTAEQPQNAAQSAPKPVFKVKYIDNTAIAGLALGQSSEGKTNDGKKQISYPIKGLPEQNAVRLTGKHPNDLEAVVGKCMETDGKDAPSGWAENGVCHTLFAKLVGNIAEDGGKLTDYLISHSALQPYQAGKSGYAAVQNGRYVLEIDSEGAF

SEQ ID NO: 3023 - protein, 181 aa, Neisseria; identical to SEQ ID NO: 214

SEQ ID NO: 3024 - protein, 109 aa, Neisseria
PLKGLPEQNVVRLTGKHPNDLEAVVGKCMETDGKGAPSGWAANGVCHTLFAKLVGNIAEDGGKLTDYLISHSALQPYQAGKSGYAAVQNGRYVLEIDSEGAFYFRRRHY

SEQ ID NO: 3025 - protein, 177 aa, Neisseria
MFSPDKTLFLCLGALLLASCGTTSGKHRQPKPKQTVRQIQAVRISHIGRTQGSQELMLHSLGLIGTPYKWGGSSTATGFDCSGMIQLVYKNALNVKLPRTARDMAAASRKIPDSRLKAGDIVFFNTGGAHRYSHVGLYIGNGEFIHAPGSGKTIKTEKLSTPFYAKNYLGAHTFFTE

SEQ ID NO: 3026 - protein, 177 aa, Neisseria
  VARIANT (1)...(177): Xaa = Any Amino Acid
MFPPDKTLFLCLSALLLASCGTTSGKHRQPKPKQTVRQIQAVRISHIDRTQGSQELMLHSLGLIGTPYKWGGSSTATGFDCSGMIQFVYKNALNVKLPRTARDMAAASRKIPDSRXKAGDLVFFNTGGAHRYSHVGLYIGNGEFIHAPSSGKTIKTEKLSTPFYAKNYLGAHTFFTE

SEQ ID NO: 3027 - protein, 177 aa, Neisseria; identical to SEQ ID NO: 1975

SEQ ID NO: 3028 - protein, 259 aa, Neisseria
MLRHLGNDFALGALFFDAAVDVPLLGDGQEVVDHPVENQTGREEEEHDGENQRHDFHHFRLHRVGRRRVQIGLGEHRCRHNDGQDVVGVGAAEVGNPAQPRCLAQFYGGEQCPVQADEDGDLQQHRQTAAQRVDFLVFEKLHHRLLLRHTVVAVFFFDGLQFGCGGTHFRHRTVGGVGQWIQYGFDDDGQNDDCPAPVADNVVQLVQEPEERRCEPVYFTVVFCQLQVVGDVCDNGCGLRTGIQVDRHFRFWPPGWDSG

SEQ ID NO: 3029 - protein, 340 aa, Neisseria
MLRHLGNDFALGALFFDAAVDVPLLGDGQEVVDYPVQYQTGREEEEHDGENQRHDFHHFRLHRVGRRRVQISLGEHRCRHNDGQDVVGVGAAEVGNPTQPRCLAQFYGGEQCPIQSDEDGDLQQHRQAAAQRVDFLVCVKLHHRLLLRHTVVAVFLFDGLQFGCGGTHFRHRAVRGVGQWIQYGFDDDGNDNRPAPVADDVVQLVQEPEERGGEPVYFAVVFGQLQVVGDVCDDGCGLRAGVEVDGGFGFAPFWMAAKGTLTLVLYSLSLRRLMSMLHSPAAQTLCLPLGWRIQVDMKWCSIMPSQPVGVLRMYSASDLPDLASSSKSEKLTFWKLPSGV

SEQ ID NO: 3030 - protein, 340 aa, Neisseria
MLRHLGNDFALGALFFDAAVDVPLLGDGQEVVDHPVQYQTGREEEEHDGENQRHDFHHFRLHRVGRRRVQIGLGEHRCRHNDGQDVVGVGAAEVGNPTQPRCLAQFYGGEQCPIQSDEDGDLQQHRQAAAQRVDFLVCVKLHHGLLLRHTVVAVFLFDGLQFGRGGTHFRHRTVRGVGQWIQYGFDDDGNDNRPAPVADDVVQLVQKPKEGGGEPVYFAVVFGQLQVVGDVCDNGCGLWAGVEVDGGFGFAPFWIAAKGTLTLVLYSLSLRRLMSIRQSPAAQTLCPPLGWRIQVDMKWCSIMPSQPVGVLRMYSASDLPDLASSSKSEKLTFWKLPSGV

SEQ ID NO: 3031 - protein, 174 aa, Neisseria
MLRIAAANQLGGRNGAAVGNGVDKFGRGADNQVEFLEGNLIVVGASGRAAVTVAVAQFERAFVVLQREVTFFGEDDVVAAVFVLFAQEQVFHDAGFGVKGFDEINPAVALAQVIELAGFHQRQFLLLLQNFGIFAAAQLCPRYHPKLHDGNQDGKRHGKLHDGAYPLFQRQSAG

SEQ ID NO: 3032 - protein, 174 aa, Neisseria
  VARIANT (1)...(174): Xaa = Any Amino Acid
MLRVAAANQLGGRNGTAVGNGVDEFGRGADNQVEFLEGNLIVVGASGRAAVTVAVAQFERAFVVVQREVTFFGEDDVVAAVFVLFAQEQVFHDAGFGIEGFDKINPAVALAQTVELACLHQRQFLLLLQDFSVFAAAXLCPRYHPKLHDGNQNGKRHGKLHHRAYPLFQCQSAG

SEQ ID NO: 3033 - protein, 173 aa, Neisseria
MLRVAAANQLGGRNGTAVGNGVDEFGRGADNQVEFLEGNLIVVGASGRAAVTVAVAQFERAFVVVQREVTFFGEDDVVAAVFVLFAQEQVFHDAGFGIEGFDKINPAVALAQTVEPACLHQRQFLLLLQDFSVFAAALCPRYHPKLHDGNQNGKRHGKLHHRAYPLFQCQSAG

SEQ ID NO: 3034 - protein, 421 aa, Neisseria
MDNLVWDGIPDIRTLDQTIRKHAHPLNLIVCLPDNQIPDFQTAQDASDSECRLKHRLDQATQCLQFDSINLIEHILPDVRFWLVPPSRTRRLHEHFHHISWQTEAIPQTESKSDKPWFALPQTSERKKPEHVLVIGAGIAGASTAHALASHGISVTVLEARKAAQAASGNRQGLLYAKISPHDTGQTELLLAGYGYTKRLLGHILPDSDTWGGNGIIHLNYSRTEQQRNHELGLQKHHNHLYRSITSAEAEKIAGIPLNTPYAEPLCGLYWQHGVWLNPPAFVRTLLSHPLIELYENTTLTGISHDGEKWIASTPNGTFTATHIIYCTGAHSPCLPETNLAALPLRQIRGQTGLTPSTPFSEQLRCAVSGESYISPSWHGLHCYGASFIPNSSNTGWNEAEEASNRQALAHLNPALAESLF

SEQ ID NO: 3035 - protein, 539 aa, Neisseria
  VARIANT (1)...(539): Xaa = Any Amino Acid
MDNLVWDGIPDIRTLDQAIRKHAPPLNLIICLPDNQIPDFQTAQDASDAECRLKHRLDQAMQCLQFDSINLIEHILPDVRFWLVPPSRTHHLHEHFHHISWQTEAIPQTESKPDKPWFALPQTSERQKPEHILVIGAGISGAATAHALASHGISVTVLEARKAAQAASGNRQGLLYAKISPHDTEQTELLLAGYGYTKRLLGHILPESETWGGNGIIHLNYSRTEQQRNHELGLQKHHNHLYRSITSAEAEKIAGIPLSVPYDHPSCGLYWQHGVWLNPPAFVRTLLNHPLIGLHEDTPLTDISHDGEKWIASTPNGTFTATHIIYCTGANSPYLPETNLAALPLRQIRGQTGLTPSTPFSEQLRCAVSGESYISPSWHGLHCYGASFIPNSSHTGWNEAEEASNRQALAHLNPALSESLFAANPNPQKHQGHAAIRCDSPDHLPLVGALGDIAAMRQTYTKLALDKNYRIDTPCPYLPNAYVNTAHGTRGLATAPICAAXXAAQIXGLPHPFXQRLRHALHPNRTIIRAIVRRKDLTP

SEQ ID NO: 3036 - protein, 539 aa, Neisseria
MDNLAWNGIPDIRTLDQTIRKHAHPLNLIVCLPDNQIPNFQTAQDASDAECRLKHRLDQATQCLQFDSINLIEHILPDVRFWLVPPSRTRRLHEHFHHISWQTEAIPQTESKPDKPWFALPQTSERQKPEHILVIGAGISGAATAHALASYGISVTVLEARKAAQAASGNRQGLLYAKISPHDTEQTELLLAGYGYTKRLLGHILPESETWGGNGIIHLNYSRTEQQRNHELGLQKHHNHLYRSITQAEAEKIAGIPLNTPYAEPLCGLFWQYGVWLNPPTFVRALLSHPLIGLHEDTPLTDISHDGEKWIASTPNGTFTATHIIYCTGANSPYLPETNLATLPLRQIRGQTGLTPSTPFSEQLRCAVSGESYISPSWHGLHCYGASFIPNSSHTGWNEAEEASNRQALAHLNPALSESLFAANPNPQKHQGHAAIRCDSPDHLPLVGALGDIAAMQQTYAKLALDKNYRIDAPCPYLPNAYANTAHGTRGLATAPICAAAVAAEILGLPHPLSKRLRHALHPNRAIIRAIVRRKDLTP

SEQ ID NO: 3037 - protein, 201 aa, Neisseria
MIQKICKLFVLIVIFATSPAFALQSDSRRPIQIEADQGSLDQANQRTTFSGNVIIRQGTLNISASCVNVTRGRQRRRIREGGRFARPLQPNVGRGQRDGARSGKQRYLFLRRKHCRSDRQCQSAARRRRCRRCGHYLQHQNRSLYHQRQHEIGCEIRFQNRQGQRRHPAFKHTKNRITPMPSETETQFRRHLPTEMPRRDY

SEQ ID NO: 3038 - protein, 151 aa, Neisseria
MIQKICKLFVLIAFFSASPAFALQSDSRQPIQIEADQGSLDQANQSTTFSGNVVIRQGTLNISAARVNVTRGRQRRRIREGGRFASPLQPDIGRRQRHGARTGKQRCLFICRQHRSLNRCQSTARRRCRRRCGDYIQHQNRSLYHQRQHKI

SEQ ID NO: 3039 - protein, 199 aa, Neisseria
  VARIANT (1)...(199): Xaa = Any Amino Acid
MIQKICKLFVLIAFFSASPAFALQSDSRQPIQIEADQGSLDQANQSTTFSGNVVIRQGTLNISAARVNVTRGXQRRRIREGGRFASPLQPDIGRRQRHGARTGKQRCLFICRQHRSLNRCQSTARRRCRRRCGDYIQHQNRSLYHQRQHKIRRKIRFQIRQGQRRYPAFEYAKIRIIPMPSETTWFGRHLPTEILKRYL

SEQ ID NO: 3040 - protein, 176 aa, Neisseria
MIQKICKLFVLIVIFATSPAFALQSDSRRPIQIEADQGSLDQANQSTTFSGNVIIRQGTLNISASRVNVTRGGKGGESVRAEGSPVRFSQTLDGGKGTVRGQANNVTYSSAGSTVVLTGNAKVQRGGDVAEGAVITYNTKTEVYTINGSTKSGAKSASKTGRVSVVIQPSSTQKTE

SEQ ID NO: 3041 - protein, 176 aa, Neisseria; identical to SEQ ID NO: 937

SEQ ID NO: 3042 - protein, 176 aa, Neisseria; identical to SEQ ID NO: 937

SEQ ID NO: 3043 - protein, 193 aa, Neisseria
MKVRWRYGIAFPLILAVALGSLSAWLGRISEVEIEEVRLNPDEPQYTMDGLDGRRFDEQGYLKEHLSAKGAKQFPENSDIHFDSPHLVFFQEGRLLYEVGSDEAVYHTENKQVLFKNNVVLTKTADGRRQAGKVETEKLHVDTESQYAQTDTPVSFQYGASHGQAGGMTYNHKTGMLNFSSKVKAAIYDTKDM

SEQ ID NO: 3044 - protein, 173 aa, Neisseria
  VARIANT (1)...(173): Xaa = Any Amino Acid
SLSAWLGRISEVEIEEVRLNPDEPQYTMDSLDGRRFDEQGYLKEHLSAKGAKQFPESSDIHFDSPHLVFFQEGRLLYEVGSDEAVYHTENKQVLFKNNVVLTKTADGKRQAGKVEAEKLHVDTESQYAQTDTPVSFQYGASHGQAGGMTYDHXTGMLNFSSKVKATIYDTKDM

SEQ ID NO: 3045 - protein, 193 aa, Neisseria
MKVRWRYGIAFPLILAVALGSLSAWLGRISEVEIEEVRLNPDEPQYTMDGLDGRRFDEQGYLKEHLSSKGAKQFPESSDIHFDSPHLVFFQEGRLLYEVGSDEAVYHTENKQVLFKNNVVLTKTADGKRQAGKVEAEKLHVDTESQYAQTDTPVSFQYGASHGQAGGMTYDHKTGMLNFSSKVKATIYDTKDM

SEQ ID NO: 3046 - protein, 155 aa, Neisseria
MISISSSVPSDEITAIIPALKRKDITLVCITARPDSTMARHADIHITASVSQEACPLGLAPTTSTTAVMALGDALAVVLLRARAFTPDDFALIHPAGSLGKRLLLRVADIMHKGGGLPAVRLGTPLKGAIVSMSEKGLGMWAGTDGQRLSERPFY

SEQ ID NO: 3047 - protein, 326 aa, Neisseria
  VARIANT (1)...(326): Xaa = Any Amino Acid
MAMAENGKYLDWAREVLHAEAEGLREIAAELXKNFVLAADALLHCKGRVVITGMVKSGHIGRKMAATMASTGTPAFFVHPAEAAHGDLGMIVDXDVVVAISNSGESDEIAAIIPALKRKDITLVCITARPDSTMARHADIHITASVSKEACPLGLAPTTSTTAVMALGDALAVVLLRARAFTPDDFALSHPAGSLGKRLLLRVADIMHKGGGLPAVRLGTPLKEAIVSMSEKGLGMLAVTDGQGRLKGVFTDGDLRRLFQECDNFTGLSIDEVMHTHPKTISAERLATEALKVMQANHVNGLLVTDADGVLIGALNMHDLLAARIV

SEQ ID NO: 3048 - protein, 326 aa, Neisseria
MAMAGNEKYLDWAREVLHTEAEGLREIAADLDENFALAADALLHCKGRVVITGMGKSGHIGRKMAATMASTGTPAFFVHPAEAAHGDLGMIVDNDVVVAISNSGESDEIAAIIPALKRKDITLVCITARPDSTMARHADIHITASVSKEACPLGLAPTTSTTAVMALGDALAVVLLRARAFTPDDFALSHPAGSLGKRLLLRVADIMHKGGGLPAVRLGTPLKEAIVSMSEKGLGMLAVTDGQGRLKGVFTDGDLRRLFQECDNFTGLSIDEVMHTHPKTISAERLATEALKVMQANHVNGLLVTDADGVLIGALNMHDLLAARIV

SEQ ID NO: 3049 - protein, 226 aa, Neisseria
MADDGLLRQLSEKPSQSALFLPFDPFVFEVLDCLLVIGPGLKQCFKQIPATRHPFADRRRLPPYPGNIRQGFEEGGKTSEHGGLIHVGIPRADILPHRVAAFGQHPAQYHTVCRLLPGKQLIRAAAHFSVQSPMDVQIGNHIVQKRQIVPGQSETAQHGRGFQKREHFADFKTAFQQVGHALQRIKKRLPAADFHVRNGIRQCLRAGLRLSEHGFHKRRIGFDIRG

SEQ ID NO: 3050 - protein, 226 aa, Neisseria
  VARIANT (1)...(226): Xaa = Any Amino Acid
MADDGVRRQLSGKLRQFGFRLPFDPFVFKVLDXLLVIGFSLEQCFKQIPATRHPFADRCGLPPYPYNIRQGFEEGGKTSEHGGLIHVGIPRADILPHRIAAFGQHPAQYHAFYRLLPGEQLIRAAAHFSVQTPVDVQIGNHVVQKRXIVLSQSETAQHGRGFXKHKHFIDFKSAFQQVEQAXQSMKQRLAAADFHVXHGIRQCLRTGLRLSEHGFDKRRIGFDIRG

SEQ ID NO: 3051 - protein, 224 aa, Neisseria
VADDGVQRQLSGKLRQFGFRLPFDPFVFEALDCLLVIAFDLEQCFKQIPATRHPFVNRRRLPPYPYNIRQGFEEGGKTSEQGGLVHVGIPRADPLPHRIAAFGQHPAQYHAFYRLLPGEQLIRAAAHFSVQTPADVQIGNHVVQKRQIVLSQSEMAQHGRGFKHKHFIDFKSAFQQVEQAQSMKQRLSAADFHIRNGIRQCLRAGLRLSEHGFDKRRIGFDIRG

SEQ ID NO: 3052 - protein, 218 aa, Neisseria
MVAVDPYTAKVVNTMPRNQGWYHTMDEIHGDMMLGAAGDYLLETAASLTIIMVVSGLYLWWAKQRGIKAMLLPPKSRARSWWRNLHGAFGTWVSLILLLFCLSGIAWAGIWGGKFVQAWNQFPAGKWGVEPNPVSIVPTHGEVLNDGKVKEVPWILELMPMPVSGTTVGENGINPTEPNNIGNRRPFRAGNRFQRALSVEFAQRRGRGMDFVAGFYEL

SEQ ID NO: 3053 - protein, 218 aa, Neisseria
  VARIANT (1)...(218): Xaa = Any Amino Acid
MVAVDPYTAKVVSTMPRNQGWYYTMDEIHSDMMLGAAGDYLLETAASLTIIMVVSGLYLWWVKRRGIKAMLLPSKGXARSWWRNLHGTFGTWVSLILLLFCLSGIAWAGIWGGKFVQAWSQFPAGKWGVEPNPVSVVPTHGEVLNDGKVKEVPWVLELTPMPVSGTTVGKDGINPDEPMTLETVDRFARXNRFQRALSVEFAQRRGRRMDFVAGFYEL

SEQ ID NO: 3054 - protein, 218 aa, Neisseria
  VARIANT (1)...(218): Xaa = Any Amino Acid
MVAVDPYTAKVVSTMPRNQGWYYAMDEIHSDMMLGSTGDYLLETAASLTIIMIISGLYLWWVKRRGIKAMLLPPKGRARSWWRNLHGAFGTWVSLILLLFCLSGIAWAGIWGGKFVQAWSQFPAGKWGVEPNPVSVVPTHGEVLNDGKVKEVPWVLELTPMPVSGTTVGKDGINPDEPMTLETVDRFARXNRFQRALSAEFAQRRGRRMDFVAGFYEL

SEQ ID NO: 3055 - protein, 213 aa, Neisseria
MTARLRKCRGFWSLCLCLSQGRLWVKTALTPPSPITLETVDRFAREIGFKGRYQLNLPKGEDGVWTLSQDSMSYDMISPFADRTVHIDQYSGEILADIRFDDYNPFGKFMAASIALHMGTLGWWSVLANVVFCLAVIFIGISGCVMWWKRRPSGVAGIVPPAQKIKLPVWWAMALPLLLIALLFPTALLAIAVIWLLDTLLLSRIPVLRKWFK

SEQ ID NO: 3056 - protein, 213 aa, Neisseria
  VARIANT (1)...(213): Xaa = Any Amino Acid
MTARLRKCRGFWSLRLCLFQGRXWAKTALTLTSRXHWKPSTALRGEIGFKGRYQLNLPKGEDGVWTLSQDSMSYDMISPFADRTVHIDQYSGKILADIRFDDYNPFGKFMAASIALHMGTLGWWSVLANVLFCLAVIFIGISGCVMWWKRRPTGAVGIVPPAQKVKLPVWWMMALPLLAIALLFPTSLLAIAVIWLLDTLLLSRIPVLRRWFK

SEQ ID NO: 3057 - protein, 212 aa, Neisseria
  VARIANT (1)...(212): Xaa = Any Amino Acid
MTARLRKCRGFWSLRLCLFQGRLWAKTVLTLTSRHWKPSTVLRXEIGFKGRYQLNLPKGEDGVWTLSQDSMSYDMISPFADRTVHIDQYSGKILADIRFDDYNPFGKFMAASIALHMGTLGWWSVLANVLFCLAVIFIGISGCVMWWKRRPSGAVGMVPPAQKIKLPVWWAMAVPLLLIALLFPTALLAIAVIWLLDTLLLSRIPVLRRWFK

SEQ ID NO: 3058 - protein, 185 aa, Neisseria
  VARIANT (1)...(185): Xaa = Any Amino Acid
MHDHGAMDRRLPAFGSLMRRAVNXIDADGFEPCLTGGIDDFFGFFVALDAVDCRLHFGVEILNADAHAVEAESAEHEDGVAADFARVDFDGIFAGRYQFEMFADHAEDTFDLFVAQKGRRAAAEVQLGKLVPSVQMWSEQFHFFFKIFDVGIGAAFVFGDDFVAAAVVADGVAKRNVNVKGKRFV

SEQ ID NO: 3059 - protein, 176 aa, Neisseria
  VARIANT (1)...(176): Xaa = Any Amino Acid
MXVLMXRSLVRQAVNQIDADGFEPRFARRIDDFFGFFVTLDAVDRRLHFGVEILNADAHAVEAESAEHEDGVAADFARVDFDGVFAGGDXLEMFAYHAEDTFDLFVAQKGACPAEVQLGKLVPSVQMWSEQFHFFFKIFDVGIGAAFVFGDDFVAAAVVADGVAERNVNVKGKRFV

SEQ ID NO: 3060 - protein, 176 aa, Neisseria
MVVLMLRSLVRQAVNQIDADGFEPRFARRIDDFFGFFVTLDAVDRRLHFGVEILNADAHAVEAESAEHEDGVAADFARVDFDGVFAGGDLEMFAYHAEDTFDLVVAQKGRRAAAEVQLGKLVPSVQMWSEQFHFFFKKFDVGIGAAFVFGDDFVAAAVVADGVAERNVNVKGKRFV

SEQ ID NO: 3061 - protein, 119 aa, Neisseria
MEFRHQVVVVGVEPFGHFDGELVFVAARQLEELFQRQVLAIEAETGGNRARGYLQVEDVMVESEITYSNVISVRSSLVFPVFLAQVFGNVEQLLFTDLFAPVFFLGEFQFTEGADTREA

SEQ ID NO: 3062 - protein, 119 aa, Neisseria
  VARIANT (1)...(119): Xaa = Any Amino Acid
VEFRHQVVVVGVEPFGHFDSELVFVTARQLEELFQRQVLAVEAEAGGNRAGGDLQVEDVVVESEIXYGNEIGVGSDLVFPVFLAQVFSNSQQFLLADFFAPVFFLCEFQFAEGADTREA

SEQ ID NO: 3063 - protein, 118 aa, Neisseria
VEFRHQVVVVGVEPFGHFDSELVFVTARQLEELFQRVLAVEAEAGGNRAGGDLQVEDVVVESEIAYGNVIGVGSGLVFPVFLAQVFSNSQQFLLADFFAPVFFLCEFQFAEGTDTREA

SEQ ID NO: 3064 - protein, 222 aa, Neisseria
  VARIANT (1)...(222): Xaa = Any Amino Acid
MDSFFKPAVWAVLWLMFAVRPALADELTNLLSSREQILRQFAEDEQPVLPVNRAPARRAGNADELIGGAMGLNEQPVVRVNRAXARRAGNADKLIGSAMRLLGIAYRYGGTSVSTGFDCSGFMQHIFKRAMGINLPRTSAEQARMGAPVARSELQPGDMVFFRTLGGSRISHVGLYIGNNRFIHAPRTGKNIEITSLSHKYWSGKYAFARRVKKNDPSRFLN

SEQ ID NO: 3065 - protein, 248 aa, Neisseria
  VARIANT (1)...(248): Xaa = Any Amino Acid
FSNPAVWAVLWLXFAVRPALADELTNLLSSREQILRQFAEDEQPVLPINRAPARRAGNADELIGSAMGLNEQPVLPVNRVPARRAGNADELIGNAMGLNEQPVLPVNRAPARRAGNADELIGNAMGLLGIAYRYGGTSVSTGFDCSGFMQHIFKRAMGINLPRTSAEQARMGTPVARSELQPGDMVFFRTLGGSRISHVGLYIGNNRFIHAPRTGKNIEITSLSHKYWSGKYAFARRVKKNDPSRFLN

SEQ ID NO: 3066 - protein, 280 aa, Neisseria
  VARIANT (1)...(280): Xaa = Any Amino Acid
MDSFFKPAVWAVLWLMFAVRPALADELTNLLSSREQILRQFAEDEQPVLPINRXPARRAGNADELIGSAMGLNEQPVLPVNRXPARRAGNADXLIGNAMGLNEQPVLPVNRVPARRAGNADELIGNAMGLNEQPVLPVNRAPARRAGNADELIGNAMGLLGIAYRYGGTSISTGFDCSGFMQHIFKRAMGINLPRTSAEQARMGTPVARSELQPGDMVXFRTLGGSRISHVGLYIGNNRFIHAPRTGKNIEITSLSHKYWSGKYAFARRVKKNDPSRFLN

SEQ ID NO: 3067 - protein, 222 aa, Neisseria; identical to SEQ ID NO: 3064
  VARIANT (1)...(222): Xaa = Any Amino Acid

SEQ ID NO: 3068 - protein, 251 aa, Neisseria; identical to SEQ ID NO: 2517

SEQ ID NO: 3069 - protein, 280 aa, Neisseria; identical to SEQ ID NO: 3066
  VARIANT (1)...(280): Xaa = Any Amino Acid

SEQ ID NO: 3070 - protein, 198 aa, Neisseria
MSEILRQPSVLLFLTLAVYALAIIVRTRTGNIFCNPVLVSTIVLIAYLKILGIDYAVYHNAAQFIDFRLKPAVVVLAVPLYQNRRKIFNQWLPVIVSQLAGSVTGIVTGMYFAAWLGPDTQFSFPPRLQYLLFTPSGIPIHTLYARVLPPFLLPPPLLPRLGPHTLRRFTILPKKLRPFKPLLPVVVLSPPGLAPPLL

SEQ ID NO: 3071 - protein, 230 aa, Neisseria; identical to SEQ ID NO: 2520

SEQ ID NO: 3072 - protein, 230 aa, Neisseria
MNEILRQPSILLFLTLAVYALAIIVRTRTGNIFCNPVLVSTIVLIAYLKILGIDYAVYHNAAQFIDFWLKPAVVVLAVPLYQNRRKIFNQWLPVIVSQLAGSVTGIVTGMYFAKWLGAEREVVLSLASKSVTNPIAIEITRSIGGIPAITAATVIIAGLVGQIAGYKMLKNTVVMPSSVGMSLGTASHAMGIAASLERSRRMAAYAGLGLTFNGVLTALIAPLLIPVLGF

SEQ ID NO: 3073 - protein, 114 aa, Neisseria
MNIIRALLIILGCLAAGETAVFLAGIKLPGSIVGMGVLFALLQAGWLKTSWLQQLTDALMANLTLFLVPPCVAVISYLDLIADDWFSILVSASASTLCVLLVTGKVHRWIRSII

SEQ ID NO: 3074 - protein, 67 aa, Neisseria
  VARIANT (1)...(67): Xaa = Any Amino Acid
TSXLQQLTDALMSNLTLFLVPPCVAVISYLDLIADDWFSILVSASASTLCVLLVTGKVHRWIRGIIR

SEQ ID NO: 3075 - protein, 114 aa, Neisseria
MNIIRALLIILGCLATGETAVFLAGIKLPGSIVGMGVLFALLQAGWVKTSWLQQLTDALMANLTLFLVPPCVAVISYLDLIADDWFSILVSASASTLCVLLVTGKVHRWIRSII

SEQ ID NO: 3076 - protein, 107 aa, Neisseria; identical to SEQ ID NO: 2007

SEQ ID NO: 3077 - protein, 107 aa, Neisseria; identical to SEQ ID NO: 2007

SEQ ID NO: 3078 - protein, 196 aa, Neisseria
MAAVSGGGAVFLIMLPHIARVQRQPPAFAQASGEIGIEAAGEIVSAAAQEVLPDKRHGAERARYRTVLMAERQAQVLFAEIFVIPIMHAAADAAVEEMMPARIDFARHAQAVAQTVCLLRQAVGGFRPASARKFNRFFGRSVVYSGLTKIRTRRRAAGSTDGTEPVRPVLGRLREPFPLSRGGATRTGFCSSAILC

SEQ ID NO: 3079 - protein, 160 aa, Neisseria
  VARIANT (1)...(160): Xaa = Any Amino Acid
AQALGEIGIEAADEIVSAAAXEVLLDKRHDAERARYRTVFIAERQAQALFAEIFVIPIMHAAAADAAVEEMMPARIDFARHAXALAQTVCLLRQAVGGFRPASARKFNRFFGRSVVYSGLTKIRTRQRSADSTNSTEPIHLVLQHLRESRSLFCSSAILC

SEQ ID NO: 3080 - protein, 191 aa, Neisseria
  VARIANT (1)...(191): Xaa = Any Amino Acid
MAVVSGGGAVFLITLPHIAHVQRQPPXFAQASGEIGIEAADEIVSAAAEVLLDKRHDAEARYTVFIAERQAQALFAEIFVILIVHAAAADVSVEEMMPARIDFARHAQAVAQTVCLLRQAVGGFRPASACKFNRFFGRSVVYSGLTKIRTRRRSADSTDSTEPIHLVLQHLRESSLAKARQRRTGFCSSTI

SEQ ID NO: 3081 - protein, 390 aa, Neisseria
MFHSIEKYRTPAQVLLGLIALTFVGFGVSTVSHPGADYIVQVGDEKISEHSINNAMQNEQADGGSPWRDAVFQSLLQRAYLKQGAKLMGISVSSEQIKQMIVDDPNFHDANGKFSHALLSQYLSQRHMSEDQFVEEIRDQFALQNLVSLVQNGVLVGDAQAEQLIRLTQVNRTIRSHTFNPDEFIAQVKASEADLQKFYNANKKDYLLPQAVKLEYVALNLKDFADKQTVSETEVKNAFEERVARLPAHEAKPSFEQEKAAVENELKMKKAVADFNKAKEKLGDDAFNHPSSLAEAAKNSGLKVETQETWLSRQDAQMSGMPENLINAVFSDDVLKKKHNSEVLTINSETAWVVRAKEVREEKNLLFEEAKDAVRQAYIRTEAAKLLKTM

SEQ ID NO: 3082 - protein, 386 aa, Neisseria
MFHSIEKYRTPAQVLLGLIALTFVGFGVSTVSHPGADYIVQVGDEKISDHSINNAIQNEQADGGGPSPDAVFQSLLQRAYLKQGAKLMGISVSSEQIKQIIVDDPNFHDANGKFDHALLNRYLSQRHMSEDQFVEEIRDQFALQNLVNLVQNGVLVGDAQAEQLIRLTQVNRTIRSHTFNPDEFIAQVKVSEADLQKFYNANKKDYLLPQAVKLEYVALNLKDFADKQTVSETEVKNAFEERVARLPANEAKPSFEQEKAAVENELKMKKAVADFNKAKEKLGDDAVNHPSSLAEAAKNSGLKVETQETWLSRQDAQMSGMPENLINAVFSDDVLKKKHNSEVLTINSETAWVVRAKEVREEKTLPFAEAKDAVRQAYIRTEAAKL

SEQ ID NO: 3083 - protein, 386 aa, Neisseria
MFHSIEKYRTPAQVLLGLIALTFVGFGVSTVSHPGADYIVQVGDEKISDHSINNAIQNEQADGGGPSRDAVFQSLLQRAYLKQGAKLMGISVSSEQIKQIIVDDPNFHDANGKFDHALLNRYLSQRHMSEDQFVEEIRDQFALQNLVNLVQNGVLVGDAQAEQLIRLTQVNRTIRSHTFNPDEFIAQVKVSEADLQKFYNANKKDYLLPKAVKLEYVALNLKDFADKQTVSETEVKNAFEERVARLPANEAKPSFEQEKAAVENELKMKKAVADFNKAKEKLGDDAFNHPSSLAEAAKNSGLKVETQETWLSRQDAQMSGMPENLINAVFSDDVLKKKHNSEVLTINSETAWVVRAKEVREEKTLPFAEAKDAVRQAYIRTEAAKL

SEQ ID NO: 3084 - protein, 512 aa, Neisseria
MFHSIEKYRTPAQVLLGLIALTFVGFGVSTVSHPGADYIVQVGDEKISEHSINNAMQNEQADGGSPWRDAVFQSLLQRAYLKQGAKLMGISVSSEQIKQMIVDDPNFHDANGKFSHALLSQYLSQRHMSEDQFVEEIRDQFALQNLVSLVQNGVLVGDAQAEQLIRLTQVNRTIRSHTFNPDEFIAQVKASEADLQKFYNANKKDYLLPQAVKLEYVALNLKDFADKQTVSETEVKNAFEERVARLPAHEAKPSFEQEKAAVENELKMKKAVADFNKAKEKLGDDAFNHPSSLAEAAKNSGLKVETQETWLSRQDAQMSGMPENLINAVFSDDVLKKKHNSEVLTINSETAWVVRAKEVREEKNLLFEEAKDAVRQAYIRTEAAKLAENKAKEVLTQLNGGKAVDVKWSEVSVLGAQQARQSMPPEAYAELLKAKPANGKPAYVRLTGLPAPVIVEAQAVTPPEDIAAQLPPAKQALAQQQSANTFDLLIRYFNGKIKQTKGAQSVDNGDGQ

SEQ ID NO: 3085 - protein, 512 aa, Neisseria; identical to SEQ ID NO: 1793

SEQ ID NO: 3086 - protein, 512 aa, Neisseria
MFHSIEKYRTPAQVLLGLIALTFVGFGVSTVSHPGADYIVQVGDEKISDHSINNAIQNEQADGGGPSRDAVFQSLLQRAYLKQGAKLMGISVSSEQIKQIIVDDPNFHDANGKFDHALLNRYLSQRHMSEDQFVEEIRDQFALQNLVNLVQNGVLVGDAQAEQLIRLTQVNRTIRSHTFNPDEFIAQVKVSEADLQKFYNANKKDYLLPKAVKLEYVALNLKDFADKQTVSETEVKNAFEERVARLPANEAKPSFEQEKAAVENELKMKKAVADFNKAKEKLGDDAFNHPSSLAEAAKNSGLKVETQETWLSRQDAQMSGMPENLINAVFSDDVLKKKHNSEVLTINSETAWVVRAKEVREEKTLPFAEAKDAVRQAYIRTEAAKLAENKAKDVLTQLNGGKAVDVKWSEVSVLGAQQARQSMPPEAYAELLKAKPANGKPAYVRLIGLPAPVIVEVQAVTPPDDIAAQLPLAKQALAQQQSANTFDLLIRYFNGKIKQTKGAQSVDNGDGQ

SEQ ID NO: 3087 - protein, 301 aa, Neisseria
MSKRKSINRPYQKPAELPPLQNNPPFYRKNRRLNFFIAADGGCASPQKCRARGFQTAFAVQGRAVSLPNAQPFAHGIHPILIAPAAPACPAVRPRRLRIFSFPQSFAFPFRLNLSVGIVGKIRLILLFFSITFIMPRRPVLHLHQVQIGFAGGYLRHFALIAVGFKHTYTDFPTLRRRAQVVARTCTVSLFHLRCVDIRHPNFMFRAVAVDDVKGIAVIDFGHRACVAVAGFRRCPSANGRVETHVPCSAEYVEYGNRRPHRLTVISRITQRAQKRQGDGKPFHDFFNLHIFQMPMPSEHL

SEQ ID NO: 3088 - protein, 74 aa, Neisseria
MSKRKSINRPYQKPAELPPLQNNPPFYRKNRRLNFFIAADGGCASPQKCRARGFQTAFAVQSRAVSLPNAQPFG

SEQ ID NO: 3089 - protein, 301 aa, Neisseria
  VARIANT (1)...(301): Xaa = Any Amino Acid
MSKRKSINRPYQKPAELPPLQNNPPFYRKNRRLNFFIXADGGCASPQKCRARGFQTAFAVQSRAVSLPNAQPFAHGIHPILIAPAAPACPAVRPRRLRIFSFPQSFAFPFRLNLSVGIIGKIRLILLFFSITFIMPRRPVLHLHQVQIGFADRNLRHFALVAVGVEHADADFPAFRRRAQVVARTRAVSLFHLRRVDIRHPDFVFRAVAVDNVKGVAVIDFGHRACVAVAGFRRCSAAGGRVGTRVPCRAEYVEYGNRRPHRLAAVPRITQRTQKRQGDGKPFHDFFNLHIFQMPMPSEHI

SEQ ID NO: 3090 - protein, 233 aa, Neisseria
MSKRKSINRPYQKPAELPPLQNNPPFYRKNRRLNFFIAADGGCASPQKCRARGFQTAFAVQGRAVSLPNAQPFAHGIHPILIAPAAPACPAVRPRRLRIFSFPQSFAFPFRLNLSVGIVGKIRLILLFFSITFIMPRRPVLHLHQVQIGFAGGYLRHFALIAVGFKHTYNEFRTLRRRAQVVARTCTVSVFHLRCVDIRHPNFMFRAVAVDDVKGIAVIDFGHRACVAVAGFR

SEQ ID NO: 3091 - protein, 309 aa, Neisseria
MSKRKSINRPYQKPAELPPLQNNPPFYRKNRRLNFFIAADGGCASPQKCRARGFQTAFAVQSRAVSLPNAQPFAHGIHPILIAPAAPACSAVRPRRLRIFSFPQSFAFPFRLNLSVGIIGKIRLILLFFSITFIMPRRPVLHLHQVQIGFADRNLRHFALVAVGIEHAHADFPAFRRRAQVVARTRAVSLFHLRRVDIRHPDFVFRAVAVDNVKGVAVIDFGHRACVAVAGFRRCSAAGGRVGTRVPCRAEYVEYGNRRPHRLAAVPRITQRTQKRQGDGKPFHDFFNLHIFQMPMPSEHIGIGFQTAS

SEQ ID NO: 3092 - protein, 309 aa, Neisseria
MSKRKSINRPYQKPAELPPLQNNPPFYRKNRRLNFFIAADGGCASPQKCRARGFQTAFAVQSRAVSLPNAQPFAHGIHPILIAPAAPACPAVRPRRLRIFSFPQSFAFPFRLNLSVGIIGKIRLILLFFSITFIMPRRPVLHLHQVQIGFADRNLRHFALVAVGVEHADADFPAFRRRAQVVARTRAVSLFHLRRVDIRHPDFVFRAVAVDNVKGVAVIDFGHRACVAVAGFRRCSAAGGRVGTRVPCRAEYVEYGNRRPHRLAAVPRITQRTQKRQGDGKPFHDFFNLHIFQMPMPSEHIGIGFQTAS

SEQ ID NO: 3093 - protein, 290 aa, Neisseria
MMGNSLIESGTFVAILFGQILGTAVAGAPPYIVGILVLLVAVGGTAGSLFMPSVPAKAADTQIEWNIVRGTKSLLRETVRHNPVFTAIIGISWFWFVGAVYTTQLPTFTQIHLGGNDNVFNLMLALFSIGIAAGSVLCAKFGRERLMLAWVTVGALGSTVCGLVLVWLTHGHRFEGLNGIFWFLSQGWAYPVMAVMTLIGFFGGFFSVPLYTWLQTASSETFRARAVAANNIVNGIFMVSAAVLSAVLLFLFDSISLLYLIVALGNIPLAVFLIKRERRFLGAAAIRKKP

SEQ ID NO: 3094 - protein, 288 aa, Neisseria
  VARIANT (1)...(288): Xaa = Any Amino Acid
MMGNSLIESGTFVAILFGQILGTAVAGVPPYIVGILVLLVAVGGTVGSLFMPSVPAKAADTQIEWNIVRGTKSLLRETVRHKPVFTAIIGISWFWFVGAVYTTQLPTFTQIHLGGNDNVFNLMLALFSIGIAAGSVLCAKFSXERLMLAWVTVGALGLTVCGLVLVWLTHGHRFEGLNGIFXFLSQGWAYPVMAVMTLIGFFGGFFSVPLYTVQTAIARFPRPAVAANNIVNGIFMVSAAVLSAVLLFLFDSISLLYLIVALGNIPLSVFLIKRERRFLGAAAIRKKP

SEQ ID NO: 3095 - protein, 436 aa, Neisseria
MYAKKGGLGLVKSRRFAPLFATQFLGAFNDNVFKTALFVMIGFYGLGQNGFLPAGQMLNLGALLFILPYFLFSSLSGQLGNKFDKAVLARWAKVLEMIIMAVAAYGFYIRSAPLLLACLFCMGAQSTLFGPLKYAILPDYLDDKELMMGNSLIESGTFVAILFGQILGTAVAGVPPYIVGILVLLVAVGGTVGSLFMPSVPAKAADTQIEWNIVRGTKSLLRETVRHKPVFTAIIGISWFWFVGAVYTTQLPTFTQIHLGGNDNVFNLMLALFSIGIAAGSVLCAKFSRERLRLAWVTVGALGLTVCGLVLVWLTHGHRFEGLNGIFWFLSQGWAYPVMAVMTLIGFFGGFFSVPLYTWLQTASSETFRARAVAANNIVNGIFMVSAAVLSAVLLFLFDSISLLYLIVALGNIPLSVFLIKRERRFLGAAAIRKKP

SEQ ID NO: 3096 - protein, 229 aa, Neisseria
MKRKNIALIPAAGIGVRFGADKPKQYVEIGSKTVLEHVLGIFERHEAVDLTVVVVSPEDTFADKVQTAFPQVRVWKNGGQTRAETVRNGVAKLLETGLAAETDNILVHDAARCCLPSEALARLIEQAGNAAEGGILAVPVADTLKRAESGQISATVDRSGLWQAQTPQLFQAGLLHRALAAENLGGITDEASAVEKLGVRPLLIQGDARNLKLTQPQDAYIVRLLLNAV

SEQ ID NO: 3097 - protein, 152 aa, Neisseria
MKRKNIALIPAAGIGARFGADKPKQYVEIGSKTVLEHTIGIFERHEAVDLTVVVVSPEDTFADKVQTAFPQVRVWKNGGQTRAETVRNGVAKLLETGLAAETDNILVHDAARCCLPSEALTRLIEQAGNAAEGGILAIPIADTLKCADGGNI

SEQ ID NO: 3098 - protein, 229 aa, Neisseria
MKRKNIALIPAAGIGARFGADKPKQYVEIGSKTVLEHTIGIFERHEAVDLTVVVVSPEDTFADKVQTAFPQVRVWKNGGQTRAETVRNGVAKLLETGLAAETDNILVHDAARCCLPSEALTRLIEQAGNAAEGGILAIPVADTLKCADGGNISATVERTSLWQAQTPQLFRAGLLHRALAAENLDGITDEASAVEKLGIRPLLVQGDARNLKLTQPQDAYIVRLLLDAV

SEQ ID NO: 3099 - protein, 223 aa, Neisseria
MKTVSAAIAFAAAAVSLTGCATESSRSLEVAKVASCNTQYHGVRTPISVGTFDNRSSFQKGIFSDSEDRLGSQAKTILVTHLQQTNRFNVLNRTNLSALKQESGISGKAQNLKGADYVVTGDVTEFGRRDVGDHQLFGILGRGKSQIAYAKVALNIVNVNTSEIVYSTQGAGEYALSNREIIGFGGTSGYDATLNGKVLDLAIREAVDNLVQAVDNGAWQSNR

SEQ ID NO: 3100 - protein, 54 aa, Neisseria
GAGEYALSNREIIGFGGTSGYDATLNGKVLDLAIREAVNSLVQAVDNGAWQPNR

SEQ ID NO: 3101 - protein, 132 aa, Neisseria
  VARIANT (1)...(132): Xaa = Any Amino Acid
NRTYLNALKQESGISGKAHNLKGANYVXTGDVTEFGRXDVGDHQLFGILGRGKSQIAYAKVALNIVNVNTSEIVYSAQGAGEYALSNREIIGFGGTSGYDATLNGKVLDLAIREAVNSLVQAVDNGAWQPNR

SEQ ID NO: 3102 - protein, 215 aa, Neisseria
MKPLILGLAAVLALSACQVRKAPDLDYTSFKESKPASILVVPPLNESPDVNGTWGMLASTAAPISEAGYYVFPAAVVEETFKENGLTNAADIHAVRPEKLHQIFGNDAVLYITVTEYGTSYQILDSVTTVSAKARLVDSRNGKELWSGSASIREGSNNSNSGLLGALVGAVVNQIANSLTDRGYQVSKTAAYNLLSPYSRNGILKGPRFVEEQPK

SEQ ID NO: 3103 - protein, 215 aa, Neisseria; identical to SEQ ID NO: 1682

SEQ ID NO: 3104 - protein, 215 aa, Neisseria; identical to SEQ ID NO: 1682

SEQ ID NO: 3105 - protein, 345 aa, Neisseria
MARFAFSADILRTAFADGFITCNRAHIAGVMPAAFAFFAVAGFGGNGKFITDFHFCFRHQQGKAQFFAQSIQIAGHFFRRGNFGFRLQGRTDSFVGAQRLDSGGYCFARFADCRPFFHQFGFGFFVDGRELVPSMEEDAVFFAAADDVPRFFAGEAQNRCNQENQAARDVVQGGLRAAAGAAVGFGGVEAVFQDVEVERAQVFRAERNNVFHGEVEGIARIVTACQTLLQPPRQYQGVAVDFHHIRLLHGIFNRIKVAQIGKQEAQGIADAAVAFGNAFEDFFGNRQFAAVIGGCRPQAQDVRAEFVIDFLRRDDVADGFRHFAAVLVNHETVGQQLFIRCASHG

SEQ ID NO: 3106 - protein, 258 aa, Neisseria
  VARIANT (1)...(258): Xaa = Any Amino Acid
LHGRTDGFVGAQRLDGGGYRFAGFADCRPFFHQFGFGFFVDGRELVPSMEEDAVXFAAAXDVPRFFAGEAQNRCNQENQTACDVIQGSLCAAACMAVCFGGVEAVFQDVEVERTQVFRAERNXVFYGKVEXITRIVIACQTLLQLTCQYHGVAVDFHHIRLLHGIFNRIKVAQVGKQKAQGIADTAVAFGYAFEDFFGNRQFAAVIGRCRPQAQDVCAEFVINLLRCNDVADGFRHFFAFAVDNETMGQQLFIRRATH

SEQ ID NO: 3107 - protein, 344 aa, Neisseria
MARFAFSADILCTAFADGFMACNRAHIAGVVPAAFAFFTITGFSGNGKFAAYFHFCFRHQQSKAQFFAQSIQIAGHFFRRGNFGFGLQGRTDGFVGAQRLDGGGYRFAGFADCRPFFHQFGFGFFVDGRELVPSMEKHAVFCAAADDVPRFFAGEAQNRCNQENQAARDVVQGGLRAAAGAAVGFGGIEAVFQDIEVERAQVFRAERNHFFHGKVEGITRIKITGNAFLQPPCQHQGIAVDFHHIRLLHGIFNRIEVAQVGKQKAQGIADTAVAFGYALEDFFGNRQFAAVIGGCRPQAQDVRAELVIHFLRRDDVADGFRHFAPVLIHHETMGQQLFVRRATH

SEQ ID NO: 3108 - protein, 382 aa, Neisseria
MRDKVGGNIALPAPRIFDSNIGKLRKNFKHILADKLGHTRRIVDKFVILTAEKQPAVRAEAVIIQNMAVVAYCHIVADKPFCARAQGFGGNNKGADGNRLAFQRPEYRVQTDISIDGIDHIFTLDAAFGRVNQPTVLIRFDARHRGLLENLRAGFGSGAGNTQRVIERMKMPGQGIELCALVHIAVKLLFQLGFIPKLIMTRTVMPLGVFMPLLQLFPMLRTDGNRGITALPIAIDGMFADAFVHQFDRLQRLLPKPLRLLQADLFFNFPHTAGVVADNLPATPAGRAEADTCGFQNDGFMSVFRQRQCGTQTAQTAADNAGFGFQTALEFRINSMRINRTKIIRRQIFLKIRANHCVCFIGYIFGRNDTDCRAISSKQKIG

SEQ ID NO: 3109 - protein, 382 aa, Neisseria
  VARIANT (1)...(382): Xaa = Any Amino Acid
MRDKVGGNVALPAPRIFDFDIGKLRKNFKHILADKLGHTLRIVDKLVILTAEKQSAVRAEAVIIQNMAVVAYCHIVTDKPFCARPQGFGRNNKGADSNRLAFQRPEYRVQTCISIDSIDHIFALDAAFGRVNQPTVLMRFDARHRGLLENLRTGFGSGTSDAQSVSERMQVSGXGVELCPLVHIAVKLLFQLGFIPKLIMTRTVMPLGVFMPLLQLFPMLRTDGNRGITALPITIDGMFADAFVHQFDRLQRLLPKPLRLLQADLFFNFPHTAXVIADNLPATPSRRAETDTRGFQHNRFMSLLRQGQCSAQTTQSAADDTGIGFQTALKFRINSMRINRTEIIRRQIFLKIRANHCVCFIRCIFGRNDTGCRAISSXQKIG

SEQ ID NO: 3110 - protein, 382 aa, Neisseria
MRDKVGGNVALPAPRIFDFDIGKLRKNFKHILADKLGHTRGIVDKLVILTAEKQSAVRAEAVIIQNMTVVAYCHIVADKPFCTRAQGFCGNNKGADSNRLALQRLEYRIQTGISIDGVHQIFAFDAAFGGVNQPTVLIRFNAYHGRMLKNLRTSFGSGAGDAQRVIERMEMPGQGIELCALVHIAVKLLLQFSVIPELIMSCTVIFLGVLMPLLQFFPMLRTDGNRGITALPIAINGMFADAFVHQFDRLQRLLPKPLRLLQTDLFFNFLHTAGVIADNLPATPSRRAETDTRGFQHNRFMSLLRQGQCSAQTTQSAADDTGIGFQTALKFRINSMRINRTEIIRRQIFLKIRANHCVCFIGYIFGRNDTGCRAISSKQKIG

SEQ ID NO: 3111 - protein, 498 aa, Neisseria; identical to SEQ ID NO: 86

SEQ ID NO: 3112 - protein, 483 aa, Neisseria; identical to SEQ ID NO: 83

SEQ ID NO: 3113 - protein, 385 aa, Neisseria
MNLPIQKFMMLFAAAISLLQIPISHANGLDARLRDDMQAKHYEPGGKYHLFGNARGSVKNRVYAVQTFDATAVGPILPITHERTGFEGIIGYETHFSGHGHEVHSPFDNHDSKSTSDFSGGVDGGFTVYQLHRTGSEIHPEDGYDGPQGSDYPPPGGARDIYSYYVKGTSTKTKSNIVPRAPFSDRWLKENAGAASGFFSRADEAGKLIWESDPNKNWWANRMDDIRGIVQGAVNPFLMGFQGVGIGAITDSAVSPVTDTAAQQTLQGINHLGNLSPEAQLAAATALQDSAFAVKDGINSARQWADAHPNITATAQTALAVAEAATTVWGGKKVELNPTKWDWVKNTGYKTPAVRTMHTLDGEMAGGNRPPKSITSNSKADASTQ

SEQ ID NO: 3114 - protein, 255 aa, Neisseria
MFHHKGIARNRRMEVLFFCRRPDRFVIRQTRLLQPHLRIILLQGDFLFFRLVQSCEVEPVLVLLHHNGKSGNAHRKQQKEIRFVHCRSDVFLCYYSGIGPAVRSATRKTALLALGLAAISASPGFNALPTIFRGGSGKSASLTAAQLGRGSCCEYFLTNCFTMRSSNEWKAMTAKRPPSFRRHMTCGNTAPTSSSSRLIKMRIAWKVRVAGSCPRSRVRTFCATICASLRVVSIGLSARCATMARTIWRLNRSSP

SEQ ID NO: 3115 - protein, 255 aa, Neisseria
  VARIANT (1)...(255): Xaa = Any Amino Acid
MLHHKGXARNRXMEVLFFCRRPDRFVVRQTRLLQPHLRIILLQGDFLFFRLIQSCEIEPVLVLLHHNGKSGNAHRKQQKEIQFVHCHSDVFLCDCSGIGPAVRSATRKTALLALGLAAISASPGFNALPTIFRGSSGKSASLTAAQRGRGACCEYFLTNCFTMRSSNEWKAMTAKRPPSFRRHMTCGNTAPTSSSSRLIKMRTAWKVRVAGSCPRSRVRTFCATICASLRVVSIGLSARCATMARAIRRLNRSSP

SEQ ID NO: 3116 - protein, 255 aa, Neisseria
MLHHKGIARNRRMEVLFFCRRPDRFVVRQTRLLQPHLRIILLQGDFLFFRLIQSCEVEPVLVLLHHNGKSGNAHRKQQKEIQFVHCHSDVFLCDCSGIGPAVRSATRKTALLALGLAAISASPGFNALPAIFRGGSGKSASLTAAQRGRGACCEYFLTNCFTMRSSNEWKAMTAKRPPSFRRHMTCGNTAPTSSSSRLIKMRIAWKVRVAGSCPRSRVRTFCATICASLRVVSIGLSARCATMARAIWRLNRSSP

SEQ ID NO: 3117 - protein, 220 aa, Neisseria
MIEVIHFFGAETRRQFACADVGRFLHNAAHIQRGVNMGIIAHGRRSDFIRLRIQPFVQIGFARIQCLRNHERFDCRTRFDHIGYGTVAPLFAVCPAGSVGIVGGRIGQGEDFPRAGIQNHHRSGFCLMVFDRLVQLFIGQGLNPLIEGKDDVFAVLRCFIARGVQAVHNIALPVPQNNFRAVFAIQAVFKRKFQTFLTFAVNIGKSDDVCKQVAHRVMAF

SEQ ID NO: 3118 - protein, 219 aa, Neisseria
  VARIANT (1)...(219): Xaa = Any Amino Acid
MIEVIHFFGTETRRQFACADVGRFLHDAAHIQRGVNMGIAHGRRSDFIRLRIQPFVQIGFARIQCLRNHKRFDCRTGFDHIGYGTVAPLFAVCPAGPVGIVGGRIGQGEDFPRAGIQXHHRSGFCLMVFDRLVQLFIGQGLNPLIEGKDDVFAVFRGFXARGVQAVHNIALPVPQNDFRAVFAMQAVFKRKFQTFLTFAVNIGKSDDVCKQVAHRVMAF

SEQ ID NO: 3119 - protein, 219 aa, Neisseria
MIEVIHFFGTETRRQFACADVGRFLHDAAHIQRGVNMGIAHGRRSDFIRLRIQPFVQIGFARIQCLRNHKRFDCRTGFDHIGYGTVAPLFAVCPAGPVGIVGGRIGQGEDFPRAGIQNHHRSGFCLMVFDRLVQLFIGQGLNPLIEGKDDVFAVFRGFIARGVQAVHNIALPVPQNDFRAVFAMQAVFKRKFQTFLTFAVNIGKSDDVCKQVAHRVMAF

SEQ ID NO: 3120 - protein, 267 aa, Neisseria
MPTRPTRAANPPTPTTWLQTAYCPRPPYRPPSVQTHTPHEPASSTCAAKSANRRENSHNAQPTYLLHPSNKMPSETEQTLFRRHQIPPSCRQSVVVMTVRTVDMTVCDFLIGCIAHAFNRSFKADFHACQRMVAVHHRLAVGNIGYTIDDNIAGFRIVRFKHHTDLDFNRERARIFNTDQLRIMLTERIVGRKRHFDRIAGILTVQRLFHQRENAVVTAVQIRNRFFGFIQKLIVGIIHLIMQRNHGIFCNSHICPFRNSRLITGAF

SEQ ID NO: 3121 - protein, 177 aa, Neisseria
RQSVVVMTVRAVDMTVCDFLIGCIAHAFNCSLKADFHACQRMVAVHHRLAVGNIGYTIDDNIAGFRIVGFKHHADFDFNREHARIFDTDQLRILLAERIVGRQRHIDRIAGILTVQRLFHQRENAVVTAVQIRNRFFGFVQKLIVGIIHLIMQRNHGIFHDSHICPFRNSRLITGAF

SEQ ID NO: 3122 - protein, 267 aa, Neisseria
MPTRPTRAAKHPTPPTWLQTAYCPRPPYRPPSVQTHTPHEPASSTCAAKSANRRENFHNAQPTYLLHPSNKMPSEMEQTLFRRHQIPPSCRQSVVVMTVRTVDMTVCDFLIGCIAHTFNRSLKADFHACQRMVAVHHRLTVGNIGYTIDDNIAGFRIVGFKHHADFDFNREHARIFNTDQLRILLAERIVGRKRHIDRIAGILTVQRLFHQRENAVVTAVQIRNRFFGFVQKLIVGIIHLIMQRNHGILHDSHICPFRNSRLITGAF

SEQ ID NO: 3123 - protein, 267 aa, Neisseria; identical to SEQ ID NO: 3120

SEQ ID NO: 3124 - protein, 267 aa, Neisseria
MPTRPTRAANPPTPPTWLQTAYCPRPPYRPPSVQTRTPREPASSTCAAKSANRRENSHNAQPTYLLHPSNKMPSETEQTLFRRHQIPPSCRQSVVVMTVRAVDMTVCDFLIGCIAHAFNCSLKADFHACQRMVAVHHRLAVGNIGYTIDDNIAGFRIVGFKHHADFDFNREHARIFDTDQLRILLAERIVGRQRHIDRIAGILTVQRLFHQRENAVVTAVQIRNRFFGFVQKLIVGIIHLIMQRNHGIFHDSHICPFRNSRLITGAF

SEQ ID NO: 3125 - protein, 267 aa, Neisseria; identical to SEQ ID NO: 3122

SEQ ID NO: 3126 - protein, 289 aa, Neisseria
MIGELVVLFVIEHFKQRAGGIAPKVAAQFVDFVEQEQRVSYACFCHILQNLAGHRADIGTAVPADFAFVAHAAQGHTDIFPPRCFGDGFAQRGFAHARRADQTQNRTFELVHTFLDGEVFQNPFFDFFQAVVVGIQHQSGFGDVFADAGFFLPRQSEQGVDVVAYDGGFGRHRRHHFEFFQFGQAFFFRFFGHTRLFDACLQGIQFAVFVFFAQFFVYRFNLFVQIIFALGFFHLAFDASAYAFFGLHNVEFGFQLCQQEFHPFADFGNLQNLLALRQFQLQMRCDRIG

SEQ ID NO: 3127 - protein, 289 aa, Neisseria
MIGKLVVLFGIEHFEQRAGGIASEVVTQFVDFVEQEQGVFHAGFCHILQNLTGHRADIGAAVSPDFAFVAHAAQSHADIFPPRCFGDGFAQRGFAHARRADQAQNRAFEFVHTFLDGEVFQNPFFDFFQAVVVGIQHQSGFGDVFADAGFFLPRQLEQSVDVVAYDGGFRRHRWHHFELFQFGQAFFFRFFGHTRLFDICFQGIQFAVFVFFAQFFVYRFNLFVQIIFALGFFHLAFDASAYAFFGLHNVEFGFQLCQQEFHPFADFGNFQNLLALRQFQLQMRCDRIG

SEQ ID NO: 3128 - protein, 289 aa, Neisseria
  VARIANT (1)...(289): Xaa = Any Amino Acid
MIGELVVLLGIKHFEQRAGGIAPEVAXQFVDFVEQEQWVFYAGFCHILQNLTGHGADIGAAVSPDFAFVAHAAQSHADIFPPRCFGDGFAQRGFAHAWRADQAQNRAFEFVHTFLDGEVFQNPFFDFFQAVVVGIQHQSGFGDVFADAGFFLPRQFEQGVDVVAYDGGFGRHRRHHFELFQFGQAFFFRFFGHTRLFDICFQGIQFAVFVFFAQFFVYRFNLFVQIIFALGFFHLAFDASAYAFFGLHNVEFGFQLCQQEFHPFADFGNFQNLLALRQFQLQMRCDRIG

SEQ ID NO: 3129 - protein, 110 aa, Neisseria
MVIVWLPELPPMPATMGISAASATIFSILPSNAPMTRLARKAVQRLTASHIQRFLTESKTGANRSSSSCKPAMFNISASDSSRITSTISSMVILPMSFLFSSTTGAVTKS

SEQ ID NO: 3130 - protein, 110 aa, Neisseria
  VARIANT (1)...(110): Xaa = Any Amino Acid
MVIVWLPELPPMPATMGISAXSATIFSMLPSNAPITRLARKAVQRLTASHIQXFFTESHTGANRSSSSCKPAIFSISASDSSRITSTISSMVILPMSFLFSSTTGAVTKS

SEQ ID NO: 3131 - protein, 110 aa, Neisseria
MVIVWLPELPPMPATMGISAASATIFSMLPSNAPITRLARKAVQRLTASHIQRFLTESKTGANKSSSSCKPAIFNISASDSSRITSTISSTVTLPMSFLFSSTTGAVTKS

SEQ ID NO: 3132 - protein, 277 aa, Neisseria
MPPEARPAGSDGIAALLRSVYTQNALQEINQIIPQTPSGFLPCHRNHSRAQHTVGQGITLLHHTNHGIGFLLTGHRLHRLMDIRIELIARFRIDFLDLRGIKRLLQLIQSHLHTHFQRIEITALIQKRHFQIILDRQHFHGKLLSGELVRIGNFLLVAAAQVLLVCQSAQLFVFQLRFQLGNPRLQILISRLGGSLFLYTVRISYCLDGFHRLHIFNRFFTVLLLCLFAHIVSLKTNWKSKSGYYPSKIRTFSRNFKQRQEISHPPPNTLPQKPYKR

SEQ ID NO: 3133 - protein, 276 aa, Neisseria
  VARIANT (1)...(276): Xaa = Any Amino Acid
MPSEARQAGSDGIAALLRSVYTQNALQEINQIIPQTPSGFLLRHRNHSRAQHAVGQRITLLHHTHHGIRLLFACHRLHRLMDIRIELIARFRVDFLDLRSIKCFLQLVQSHLHAHFQRIEIAALIQKRHFQIILDRQHFHGKLLSGELVRIRNFLLVAAAQVLLVCQSALLVFQLRFQLGNPRLQILISRLCGSLFLHTVRISYCFDGFHRLHIFNRFFTVLLLCLFAHIVSLKTNWKSKSSYYPRKIRTFSRNFXQXQRISNSFSNPLPKKXYRR

SEQ ID NO: 3134 - protein, 276 aa, Neisseria
MPSEARQAGSDGIAALLRSVYTQNALQEINQIIPQTPSGFLLCHRNHSRAQHAVGQRITLLHHAHHGIGFLFACHRLHRLMDIRIELIARFRIDFLDLRSIKCFLQLVQSHLHAHFQRIEIAALIQKRHFQIILDRQHFHGKLLSGELVRIRNFLLVAAAQVLLVCQSAQLLVFQLRFQLGNPRLQILISRLCGSLFLHTVRISYCLDGFHRLHIFNRFFTVLLLCLFAHIVSLKTNWKSKSSYYPRKIRTFSRNFKQRQRISNSFSNPLPKKYRR

SEQ ID NO: 3135 - protein, 277 aa, Neisseria; identical to SEQ ID NO: 3132

SEQ ID NO: 3136 - protein, 272 aa, Neisseria
  VARIANT (1)...(272): Xaa = Any Amino Acid
MPSEARQAGSDGIAALLRSVYTQNALQEINQIIPQTPSGFLLRHRNHSRAQHAVGQRITLLHHTHHGIRLLFACHRLHRLMDIRIELIARFRVDFLDLRSIKCFLQLVQSHLHAHFQRIEIAALIQKRHFQIILDRQHFHGKLLSGELVRIRNFLLVAAAQVLLVCQSALLVFQLRFQLGNPRLQILISRLCGSLFLHTVRISYCFDGFHRLHIFNRFFTVLLLCLFAHIVSLKTNWKSKSSYYPRKIRTFSRNFXQXQRISNSFSNPLPKK

SEQ ID NO: 3137 - protein, 273 aa, Neisseria
MPSEARQAGSDGIAALLRSVYTQNALQEINQIIPQTPSGFLLCHRNHSRAQHAVGQRITLLHHAHHGIGFLFACHRLHRLMDIRIELIARFRIDFLDLRSIKCFLQLVQSHLHAHFQRIEIAALIQKRHFQIILDRQHFHGKLLSGELVRIRNFLLVAAAQVLLVCQSAQLLVFQLRFQLGNPRLQILISRLCGSLFLHTVRISYCLDGFHRLHIFNRFFTVLLLCLFAHIVSLKTNWKSKSSYYPRKIRTFSRNFKQRQRISNSFSNPLPKK

SEQ ID NO: 3138 - protein, 169 aa, Neisseria
MYGRNGSTQAAVAFVFDQTQRARFGNGEVYAAQADIGSAVNIAQGFAGESGQLVHVVCKRCAEVLVEQFADLFFGFMDCGHHDMGRFFACHLDDKLAQVAFHRLNAFCFKIMVQLDFFADHGFAFDHQLAVFGCDDVVDNLAGFGRGFRPVYFHAQLSQVFFQLLQQRG

SEQ ID NO: 3139 - protein, 150 aa, Neisseria
  VARIANT (1)...(150): Xaa = Any Amino Acid
MHGRYGGTQATVAFVFHQTQRTCFSNGKVYATQTDIGSAVNIAQCFTGEAGQLVYIVCQRRTEVLVEQFANLFFGFVDSRHHDMGRFFACHLDDELAQVAFYRFNAFCFKIMXQLDFLADHRFAFDHQLAVFGCDDVVDNLAGFGRGFCP

SEQ ID NO: 3140 - protein, 166 aa, Neisseria
MHGRNGGTQATVAFVFHQTQRTCFSNGEVHATQTDIGSAVNIAQCFTGEAGQLVYVVRRCAEVLVEQFANLFFGFMDCGHHDMGRFFTCHLDDELAQVAFHRFNAFCFKIMVQLDFLADHRFAFDHQLAVFGCDDVVDDFAGFGRCFRPVYFYAQLGQVFFQLLQQ

SEQ ID NO: 3141 - protein, 326 aa, Neisseria
MKRKMLNVPKGGYDGMKGFTIVEFLVAGLLSIIVLIAVVSSYFTSRKLNDVANERLAIQQDLRNAATLIVRDARMAGSFGCFNMSEHTKDDIVDSSNQTQSNLAKPGAKQENPLFSLKRSGMDKQLIPVAESIDIKYPGFIQRLNALVFQYGIDDLDASAETVVVSSCSKIAKPGKKISTLQEAKSALQITNDDKQNGNITRQKHVVNAYAVGRFGNNEESLFRFQLDDKGKWGNPQLLVKKVKRMDVRYIYVSGCPEDEDAGKEEKFRYTNKFDKSKNAVTPAGVEVLLDSGLNAKIAASSDNSIYAYRINATIRGGNVCANRTL

SEQ ID NO: 3142 - protein, 225 aa, Neisseria
  VARIANT (1)...(225): Xaa = Any Amino Acid
XRRKMLNVXXGSYDGMKGFTIIEFLVAGLLSMIVLMAVGSSYFTSRKLNDAANERLAAQQDLRNAATLIVRDARMAGGFGCFNMSEHPATDVIPDTTQQNSPFSLKRNGIDKLIPIAESSNINYQNFFQVGSALIFQYGIDDVNASTATTVVSSCAAISKPGKQIPTLEDAKKELKIPDQDKEQNGNIARQRHVVNAYAVGRIADEESLFRFQLDDKGKWGNPQL

SEQ ID NO: 3143 - protein, 332 aa, Neisseria
  VARIANT (1)...(332): Xaa = Any Amino Acid
MRRKMLNVPKGNYDGMKGFTIIEFLVAGMLSMIVLMAVGSSYFTSRKLNDAANERLSAQQDLRNAATLIVRDARMAGGFGCFNMSEHTKNDIIVDPSKQTQHVPVKPGAKQENPLFSLEWANTNNTNNNTAKLIPIAESTDIKYPGFAQARPALIFQYGIDDLDASAETVVVSSCSKIAKPGKKISTLQEAKSALQITNDDKQNGNITRQRHVVNAYAVGRIAGEEGLFRFQLDDKGKWGNPQLLVKKIRHMKVRYIYVSDCPEDDDAGKEEKFKYTGTFDSSTNAVTPAGVEVLLSXGTDTKIAASSDNHIYAYRIDATIRGGNVCANRTL

SEQ ID NO: 3144 - protein, 221 aa, Neisseria
PGAKQENPLFSLKRSGMDKQLIPVAESIDIKYPGFIQRLNALVFQYGIDDLDASAETVVVSSCSKIAKPGKKISTLQEAKSALQITNDDKQNGNITRQKHVVNAYAVGRFGNNEESLFRFQLDDKGKWGNPQLLVKKVKRMDVRYIYVSGCPEDEDAGKEEKFRYTNKFDKSKNAVTPAGVEVLLDSGLNAKIAASSDNSIYAYRINATIRGGNVCANRTL

SEQ ID NO: 3145 - protein, 313 aa, Neisseria; identical to SEQ ID NO: 1461

SEQ ID NO: 3146 - protein, 205 aa, Neisseria
NNTAKLIPIAESTDIKYPGFAQARPALIFQYGIDDLDASAETVVVSSCSKIAKPGKKISTLQEAKSALQITNDDKQNGNITRQRHVVNAYAVGRIAGEEGLFRFQLDDKGKWGNPQLLVKKIRHMKVRYIYVSDCPEDDDAGKEEKFKYTGTFDSSTNAVTPAGVEVLLSSGTDTKIAASSDNHIYAYRIDATIRGGNVCANRTL

SEQ ID NO: 3147 - protein, 203 aa, Neisseria
MRKQNTLTGIPTSDGQRGSALFIVLMVMIVVAFLVVTAAQSYNTEQRISANESDRKLALSLAEAALREGEFQVLDLEYAADSKVTFSENCEKGLCTAVNVRTNNNGSEEAFGNIVVQGKPAVEAVKRSCPAKSGKNSTDLCIDNKGMEYNKGAAGVSKMPRYIIEYLGVKNGQNVYRVTAKAWGKNANTVVVLQSYVGNNDEQ

SEQ ID NO: 3148 - protein, 180 aa, Neisseria
  VARIANT (1)...(180): Xaa = Any Amino Acid
GFALLIVLMVXIVVAFXXVTAAQSYNTEQRISXNESDRKLAXSLAEXXXREGELQVLDLEYDTDSKVTFSENCGKGLXAAVNVRTNNDNEEAFDNIVVQGKPTVEAVKRSCPANSTDLCIDKKGXEYKKGTRSVTKMPRYIIEYLGVXNGENVYRVTAKAWGKNANTVVVLQSYVSNNDE

SEQ ID NO: 3149 - protein, 197 aa, Neisseria
MRKQNTLTGIPTSDGQRGFALFIVLMVMIVVAFLVVTAAQSYNTEQRISANESDRKLALSLAEAALREGELQVLDLEYDTDSKVTFSENCGKGLCTAVNVRTNNDNEEAFDNIVVQGKPTVEAVKRSCTAKSTGLCIDNKGMEYKKGTQSVSKMPRYIIEYLGVKNGENVYRVTAKAWGKNANTVVVLQSYVSNNDE

SEQ ID NO: 3150 - protein, 197 aa, Neisseria; identical to SEQ ID NO: 1462

SEQ ID NO: 3151 - protein, 203 aa, Neisseria
MKNNDCLRLKNPQSGMALIEVLVAMLVLTIGILALLSVQLRTVASVREAETQTIVSQITQNLMEGMLMNPTIDLDSNKKNYSLYMGKQTLSAVDGEFMLDAEKSKAQLAEEQLKRFSHELKNALPDAVAIHYAVCKDSSGDAPTLSDSGAFSSNCDNKANGDTLIKVLWVNDSAGDSDISRTNLEVSGDNIVYTYQARVGGRE

SEQ ID NO: 3152 - protein, 202 aa, Neisseria
  VARIANT (1)...(202): Xaa = Any Amino Acid
MKNNDCFRLKDSQSGMALIEVLVAMLVLTIGILALLSVQLRTVXXXXXXXXXXXXXXXXXXLMEGMLMNPTIDSDSNKKNYNLYMGNHTLSAVDGDFAIDAMKTKGQLAEAQLKRFSYELKNALPDAAAIHYAVCKDSSGNAPTLSGNAFSSNCDNKANGDTLIKVLWVNDSAGDSDISRTNLEVSGDNIVYTYQARVGGRE

SEQ ID NO: 3153 - protein, 204 aa, Neisseria
MKNNDCFRLKNPQSGMALIEVLVAMLVLTIGILALLSVQLRTVASVREAETQTIVSQITQNLMEGMLMNPTIDSDSNKKNYNLYMGNHHALSVVDGDFQVDAIKTKTQLAEAQLKRFSYELKNALPDAAAIHYAVCKDSSGVAPTLSAGSTFSSNCDGSANGDTLIKVLWVNDSAGDSDIARTNLETNGNNIVYTYQARVGGRE

SEQ ID NO: 3154 - protein, 202 aa, Neisseria
MKNNDCFRLKDSQSGMALIEVLVAMLVLTIGILALLSVQLRTVASVREAETQTIVSQITQNLMEGMLMNPTIDSDSNKKNYNLYMGNHTLSAVDGDFAIDAMKTKGQLAEAQLKRFSYELKNALPDAAAIHYAVCKDSSGNAPTLSGNAFSSNCDNKANGDTLIKVLWVNDSAGDSDISRTNLEVSGDNIVYTYQARVGGRE

SEQ ID NO: 3155 - protein, 113 aa, Neisseria
MTHTASPRDEFIRGIKESSPMLIGLLPWALILGMQGGQKGMGRLEMLLMTGMNFAGGSEFATVNLWAEPLPILLIATITFMINSRHILMGGGACHAHERNTAEKSRARAVFYV

SEQ ID NO: 3156 - protein, 112 aa, Neisseria
MHTPSPHNEFIRGIKESSPMLIGLLPWALILGMQGGQKGMSWLEMLLMTSMNFAGGSEFATVNLWAEPLPILLIATVTFMINSRHILMGGGACPAPERNTAEKSRARTVFYV

SEQ ID NO: 3157 - protein, 113 aa, Neisseria
  VARIANT (1)...(113): Xaa = Any Amino Acid
MTHISSPRNEFIRGIKESSPMLIGLLPWALILGMQGGQKGMSWLEMLLMTGMNFAGGSEFATVNLWAEPLPILLIATVTFMINSRHILMGXGTCPAPERNTAEKSRARTVFYV

SEQ ID NO: 3158 - protein, 244 aa, Neisseria
MPDPIGILFAAVGVDFFAVVLRGRFQRIGAVGMLIIIILMAEVGTKTVVTEVDAQVVADFGGIEGFFECRLQEPVAFPVNHAVGFVVGRRLVGTRAAIFVRTVGGTVRLLKMIVQTDALPVVREAGIIRPSVFIGIGIDIFQTVAAFGVRLVVKHARTVFRAHLRTVFTVGNQPAVFAAARVFAVASYRSVFFIFIKNRLGQECRNRHIARVESLLRAFEYAADVVPFVFKTKTRAEQPRPAFV

SEQ ID NO: 3159 - protein, 304 aa, Neisseria
MRAAVVVAQARADIRPPAQTDIVPNCRVIAFTVDAARRAVRISIVAQAADLPRNDISPAYGDPIGAGFTAVGADFFAVVLRGRVRRIGAVGMLIIIILMAEIRAKAVKPEIHAQVVADFGGIEGFFECRLQEPVAFPVNHAIGFVIGKRLVGTRAAIFVRTVGRTVRLLKMIIQTDALPVVREAGIIRPSVFIGIGIDIFQTVAAFGVRLVVKHARTVFRAHQRTVFAVGKQSAVFVVARVFAVTGQRTRLFFICIKNRLGQECRNRHIARVESLLRVFEYAADVVPLILKTKTRAEQPRPAFV

SEQ ID NO: 3160 - protein, 299 aa, Neisseria
MRAAVVVAQPRADIRPPAQTDIVPNCRVIAFAVDAARRAVRISIVAQAADLPRNHISPAYADPIGLVLAAVGVGGFRGRFRRIGAVGMLIIIILMAEIRVKAVKTEIHAQVVADFGGIEGFFECRLQEPVAFPVNHAVGFVVGKRLVGTRAAIFVRTVGRTVRLLKMIVQTDALPVVREAGIIHPSVFIGIGIDIFQTVAAFGVRLVVKHARTVFRAHQRTVFAVGKQTAVFVVARVFAVASYRSVFSIFIKNRLGQECRNRHIARVESLLRVFEYAADVVPFVFKTKTRAEQPRSAFV

SEQ ID NO: 3161 - protein, 397 aa, Neisseria; identical to SEQ ID NO: 102

SEQ ID NO: 3162 - protein, 397 aa, Neisseria
MIDRNRMLRETLERVRAGSFWLWVVAATFAFFTGFSVTYLLMDNQGLNFFLVLAGVLGMNTLMLAVWLAMLFLRVKVGRFFSSPATWFRGKDPVNQAVLRLYADEWRQPSVRWKIGATSHSLWLCTLLGMLVSVLLLLLVRQYTFNWESTLLSNAASVRAVEMLAWLPSKLGFPVPDARAVIEGRLNGNIADARAWSGLLVGSIACYGILPRLLAWVVCKILLKTSENGLDLEKPYYQAVIRRWQNKITDADTRRETVSAVSPKIILNDAPKWAVMLETEWQDGEWFEGRLAQEWLDKGVATNREQVAALETELKQKPAQLLIGVRAQTVPDRGVLRQIVRLSEAAQGGAVVQLLAEQGLSDDLSEKLEHWRNALAECGAAWLEPDRAAQEGRLKDQ

SEQ ID NO: 3163 - protein, 400 aa, Neisseria
MIDRNRMLRETLERVRAGSFWLWVAAATFAFFTGFSVTYLLMDNQGLNFFLVLAGVLGMNTLMLAVWLAMLFLRVKVGRFFSSPATWFRGKDPVNQAVLRLYADEWRQPSVRWKIGATSHSLWLCTLLGMLVSVLLLLLVRQYTFNWESTLLGDSSSVRLVEMLAWLPAKLGFPVPDARAVIEGRLNGNIADARAWSGLLVGSIACYGILPRLLAWAVCKILLKTSENGLDLEKPYYQAVIRRWQNKITDADTRRETVSAVSPKIVLNDAPKWAVMLETEWQDGEWFEGRLAQEWLDKGVAANREQVAALETELKQKPAQLLIGVRAQTVPDRGVLRQIVRLSEAAQGGAVVQLLAEQGLSDDLSEKLEHWRNALTECGAAWLEPDRAAQEGRLKTNDRT

SEQ ID NO: 3164 - protein, 208 aa, Neisseria
MYAGERFNTYSHLSGLILAAAGLMLMLLKTIGHGDGYRIFSVSVYGISLLLLYLSSSLYHGIAAGKLKSILKKTDHCMIYVLIAGSYTPFALVSLRNGPGWTVFSLSWLLAAAGIAQELTIGRKSEKRLLSIAIYIVMGWMVLAVMKSLTASLPPAGLAWLAAGGMLYSVGIYWFVNDEKIRHGHGIWHLFVLGGSITQFVSVYGYVI

SEQ ID NO: 3165 - protein, 167 aa, Neisseria
VSVYGISLLLLYLSSWLYHGIAAGKLKSILKKTDHCMIYVLIAGSYTPFALVSLRNGPGWTVFSLSWLLAAAGIAQELTIGRKSEKRLLSIVIYVVMGWMVLAVMKSLTASLPSAGLAWLAAGGMLYSVGIYWFVNDEKIRHGHGIWHLFVLGGSITQFVSVYGYVI

SEQ ID NO: 3166 - protein, 208 aa, Neisseria
MYTGERFNTYSHLSGLILAAAGLALMLLKTIGHGDGYRIFSVSVYGISLLLLYLSSSLYHGIAAGKLKSILKKTDHCMIYVLIAGSYTPFALVSLRNGPGWTVFSLSWLLAAAGIAQELTIGRKSEKRLLSIAIYIVMGWMVLAVMKSLTASLPPAGLAWLAAGGMLYSVGIYWFVNDEKIRHGHGIWHLFVLGGSITQFVSVYGYVI

SEQ ID NO: 3167 - protein, 188 aa, Neisseria
MVGQEALRGQFVAVFAAALRYAVKTCADFHAFDGVDAHHRVGDFGIEAVENGFAQTDGDVGGFDMQFRADGIQGFAHTVHIVFQFGDLALVGGKKRILGNVFAAFKPDFFFADLGNVGGDFRAEFFFQPFFGNGSGGNAGCGFAGGTPAAAPVVARTVFVPIGIVGVSGAEGGGDVAVVFAALVGVAD

SEQ ID NO: 3168 - protein, 188 aa, Neisseria
VVGQEALRGQFVAVFAAALRYAVKTCADFHAFDGVDAHHRVGDFGIEAVKNRFAQADRDIGCFDMQLRADGIQGFAHAVHIVFQLGNLAMVGGKKRILGNVFAAFKPDFFFADLGNVGGDFRAEFFFQPFFGNGSGSNAGGGFTGGAPAAAAVVARAVFVPIGIVGVAGAEAGGDVAVVFAALVGIAD

SEQ ID NO: 3169 - protein, 188 aa, Neisseria
VVGQEALRGEFVAVFAAALRYAVKTCADFHAFDGVDAHHGVGDFGIEAVEYGFAQADGDVGGFNMQLRADGIQGFAHAVHIVFQLGNLAMVGGKKRILGNVFAAFKPDFFFADLGNVGGDFRAEFFFQPFFGNGSGGNAGGGFAGGTPAAAPVVARAVFVPIGIVGVAGAEAGGDVAVVFAALVGIAD

SEQ ID NO: 3170 - protein, 239 aa, Neisseria
MLAVRNRGWHGAVVHFRSCGGVANTAPVFYHLGDTAEIAFALDTLTARYREIYAVGVSLGGNAPAKYLGEQGKKALPHASAAVSAPVDAEAAGSRFDSGITRLLYTRYFLRTLIPKARSLQGFQTAFAAGCKTLGEFDDRFTAPLHGFADRHDYYRQTSCKPLLKHVAKPLLLLNAANDPFLPPEALPRADEASEAVTLFQPAHGGHAGFVSSTGGRLHLQWLPQTVLSYFDSFRTNRR

SEQ ID NO: 3171 - protein, 239 aa, Neisseria
  VARIANT (1)...(239): Xaa = Any Amino Acid
MLAVRDRGWHGVVVHFRSCGGIANTAPVFYXLGDTAEIAFTLDTFAARYREIYAVGVSLGGNALAKYLGEQGKKALPQAAAVISAPVDAEAAGRRFDSGITRLLYTRYFLRTLIPKAKSLQGFQTAFAAGCKTLGEFDDRFTAPLHGFADRHDYYRQTSCKPLLKHVAKPLLLLNAVNDPFLPPEALPRADEVSEAVTLFQPAYGGHVGFVSSTGGRLHLQWLPQTVLSYFDSFRTNRR

SEQ ID NO: 3172 - protein, 239 aa, Neisseria
MLAVRDRGWNGVVVHFRSCGGVANTAPVFYHLGDTAEIAFTLDTLAARYREIYAVGVSLGGNALAKYLGEQGENALPQAAAVISAPVDAEAAGNRFDSGITRLLYTRYFLRTLIPKARSLQGFQTAFAAGCKTLGEFDDRFTAPLHGFADRHDYYRQTSCKPLLKHVAKPLLLLNAVNDPFLPPEALPRADEVSEAVTLFQPTHGGHVGFVGSTGGRLHLQWLPQTVLSYFDSFRTNRR

SEQ ID NO: 3173 - protein, 319 aa, Neisseria
MILTPPDTPFFLRNGNADTIAAKFLQHPAPAYRREMLPDSTGKTKTAYDFSAGGISPDAPLVVLFHGLEGSSRSHYAVELMLAVRNRGWHGAVVHFRSCGGVANTAPVFYHLGDTAEIAFALDTLTARYREIYAVGVSLGGNAPAKYLGEQGKKALPHASAAVSAPVDAEAAGSRFDSGITRLLYTRYFLRTLIPKARSLQGFQTAFAAGCKTLGEFDDRFTAPLHGFADRHDYYRQTSCKPLLKHVAKPLLLLNAANDPFLPPEALPRADEASEAVTLFQPAHGGHAGFVSSTGGRLHLQWLPQTVLSYFDSFRTNRR

SEQ ID NO: 3174 - protein, 318 aa, Neisseria; identical to SEQ ID NO: 865

SEQ ID NO: 3175 - protein, 318 aa, Neisseria
MILTPPDTPFFLRNGNADTIAAKFLQRSAPAYRRELLPDSTGKTKTAYDFSDGISPDAPLVVLFHGLEGGSGSHYAVELMLAVRDRGWNGVVVHFRSCGGVANTAPVFYHLGDTAEIAFTLDTLAARYREIYAVGVSLGGNALAKYLGEQGENALPQAAAVISAPVDAEAAGNRFDSGITRLLYTRYFLRTLIPKARSLQGFQTAFAAGCKTLGEFDDRFTAPLHGFADRHDYYRQTSCKPLLKHVAKPLLLLNAVNDPFLPPEALPRADEVSEAVTLFQPTHGGHVGFVGSTGGRLHLQWLPQTVLSYFDSFRTNRR

SEQ ID NO: 3176 - protein, 126 aa, Neisseria
MGRHFGRRRFLTAAAVAVAGAAVSFLPNPFAAGGEKRNMDKKRDENVFFWKGVALGSGAELRLFGVDDRQAADLVNKVLAEVARLEKMFSLYREDSLISRLNRDGYLTSPPADFLELLSLAAIFTR

SEQ ID NO: 3177 - protein, 126 aa, Neisseria
  VARIANT (1)...(126): Xaa = Any Amino Acid
MGRHFGXQRFLTVAAVAAGXAAVSFLPNPFAADDEKRNGDEKRNENVFFWKGVALGSGAXLRLFGVDDRRAADLVNKVLAEVARLEKLFSLYREDSLISRLNRDGYLTSPSADFLELXSLAAIFTX

SEQ ID NO: 3178 - protein, 126 aa, Neisseria
MGRHFGRRRFLTVAAVAAAGAAVSFLPNPFAADDEKRNKDEKRNENVFFWKGVALGSGAELRLFGVDDRRAADLVNKVLAEVARLEKMFSLYREDSLISRLNRDGYLTSPPADFLELLSLAVIFTR

SEQ ID NO: 3179 - protein, 400 aa, Neisseria; identical to SEQ ID NO: 128

SEQ ID NO: 3180 - protein, 588 aa, Neisseria
  VARIANT (1)...(588): Xaa = Any Amino Acid
MRRFLPIAAICAVVLLYGLTAATGSTSSLADYFWWIVAFSAMLLLVLSAVLARYVILLLKDRRDGVFGSQIAKRLSGMFTLVAVLPGVFLFGVSAQFINGTINSWFGNDTHEALERSLNLSKSALNLAADNALGNAVPVQIDLIGAASLPGDMGRVLEHYAGSGFAQLALYNAASGKIEKSINPHKLDQPFPGKARWEKIQRAGSVRDLESIGGVLYAQGWLSAGTHNGRDYALFFRQPVPKGVAEDAVLIEKARAKYAELSYSKKGLQTFFLATLLIASLLSIFLALVMALYFARRFVEPVLSLAEGAKAVAQGDFSQTRPVLRNDEFGRLTKLFNHMTEQLSIAKEADERNRRREEAARHYLECVLEGLTTGVVVFDEQGCLKTFNKAAEQILGMPLTPLWGSSRHGWHGVSAQQSLLAEVFAAIGAAAGTDKPVHVKYAAPDDAKILLGKATVLPEDNGNGVVMVIDDITVLIHAQKEAAWGEVAKRLAHEIRNPLTPIQLSAERXAXKLGGKLDEQDAQILTRSTDTIVKQVAALKEMVEAFRNYARSPSLKLENQDLNALIGDVLALYEAGPCRFAADLPANR

SEQ ID NO: 3181 - protein, 706 aa, Neisseria
MRRFLPIAAICAVVLLYGLTAATGSTSSLADYFWWIVAFSAMLLLVLSAVLARYVILLLKDRRDGVFGSQIAKRLSGMFTLVAVLPGVFLFGVSAQFINGTINSWFGNDTHEALERSLNLSKSALNLAADNALGNAIPVQIDLIGAASLPGDMGRVLEHYAGSGFAQLALYNAASGKIEKSINPHKLDQPFPGKARWEKIQQAGSVRDLESIGGVLYAQGWLSAGTHNGRDYALFFRQPVPKGVAEDAVLIEKARAKYAELSYSKKGLQTFFLATLLIASLLSIFLALVMALYFARRFVEPVLSLAEGAKAVAQGDFSQTRPVLRNDEFGRLTKLFNHMTEQLSIAKEADERNRRREEAARHYLECVLEGLTTGVVVFDEQGCLKTFNKAAEQILGMPLTPLWGSSRHGWHGVSAQQSLLAEVFAAIGAAAGTDKPVHVKYAAPDDAKILLGKATVLPEDNGNGVVMVIDDITVLIHAQKEAAWGEVAKRLAHEIRNPLTPIQLSAERLAWKLGGKLDEQDAQILTRSTDTIIKQVAALKEMVEAFRNYARSPSLKLENQDLNALIGDVLALYEAGPCRFAAELAGEPLMMAADTTAMRQVLHNIFKNAAEAAEEADVPEVRVKSEAGQDGRIVLTVCDNGKGFGREMLHNAFEPYVTDKPAGTGLGLPVVKKIIEEHGGRISLSNQDAGGACVRIILPKTVETYA

SEQ ID NO: 3182 - protein, 216 aa, Neisseria
MMMHASVQSRFAPILYVLIFFAGFLTAQIWFNQKAYTEELPPLLSALSAVALVWLAWAFVSVRSKAKAEKFYREKMIQNESIHPVLHASLQHLEHKPQMLALLVKNHGKGMAEQVRFKAEVLPDDEDARTIAAELAKMDMFALGTDAVASGETYGRVFADIFELSAALERRAFKGILKLTAEYKKHLRRCLPFGNGVGFGRAQSGVEGNLENAGKA

SEQ ID NO: 3183 - protein, 214 aa, Neisseria
  VARIANT (1)...(214): Xaa = Any Amino Acid
MMMHASVQSRFAPILYVLIFFAGFLTAQIWFNQKAYTEELPPLLSALSAVALVWLAWAFVSARSKAKAEKFYREKMIQNESIHPVXHASLQHLEHKPQILALLVKNHGKGMAEQVRFKAEVLPDDEDARTIAAELAKMDMFALGTDAVASGETYGRVFADIFELSXALEGRAFKGMLKLTAEYKXHLRRCLPFGNGVGVGRTQSGVAGDFKNIR

SEQ ID NO: 3184 - protein, 217 aa, Neisseria
  VARIANT (1)...(217): Xaa = Any Amino Acid
MMMHASVQSRFAPILYVLIFFAGFLTAQIWFNQKAYTEELPPLLSALSAVALVWLAWAFVSARSKAKAEKFYREKMIQNESIHPVLHASLQHLEHKPQMLALLVKNHGKGMAEQVRFKAEVLPDDEDARTIAAELAKMDMFALGTDAVASGETYGRVFADIFELSAALEGRAFKGMLKLTAEYKXHLRRCLPFGNGVGVGRAQSGVAGDFKNIGKVQ

SEQ ID NO: 3185 - protein, 169 aa, Neisseria
MMMHASVQSRFAPILYVLIFFAGFLTAQIWFNQKAYTEELPPLLSALSAVALVWLAWAFVSVRSKAKAEKFYREKMIQNESIHPVLHASLQHLEHKPQMLALLVKNHGKGMAEQVRFKAEVLPDDEDARTIAAELAKMDMFALGTDAVASGETYGRVFADIFELSAALE

SEQ ID NO: 3186 - protein, 221 aa, Neisseria; identical to SEQ ID NO: 700

SEQ ID NO: 3187 - protein, 221 aa, Neisseria
MMMHASVQSRFAPILYVLIFFAGFLTAQIWFNQKAYTEELPPLLSALSAVALVWLAWAFVSARSKAKAEKFYREKMIQNESIHPVLHASLQHLEHKPQMLALLVKNHGKGMAEQVRFKAEVLPDDEDARTIAAELAKMDMFALGTDAVASGETYGRVFADIFELSAALEGRAFKGMLKLTAEYKNIFGDACRSETALELGALNQALQEISKTSEKSKRIFY

SEQ ID NO: 3188 - protein, 193 aa, Neisseria
MGAGVVFVVFQPFFSLFRALFEGGVGIVEGAHDAAECDFLSEEFTRIRIGDVFIDSVGQITARFFQAFGVNPGAFGVQQPAFRAREQARRGSGFFAGNDLRVLHKDAVEVDIDGGNTVSGHFLIRTDFDDGDAVCLFQAEARFAANVAQHQYLARINQVGIVDLIPVRAPQGGTIATGCTGICPKYPTGCRPV

SEQ ID NO: 3189 - protein, 171 aa, Neisseria
  VARIANT (1)...(171): Xaa = Any Amino Acid
MGAGMVFVVFRPFSSLFRALFEDRVGIVEGAHDAAECDFLPEEFTRIRIGDVFIDSVGQVAARLFQAFGVNPGAFGVQQPAFRARXXARXGSGFFAGNDLRMPHKDAVEVDIDGGNTVSGHFLIRTHFDDGDAVCLFQAEARFAVNVAQHQYLVRINQVGIVDLIPVRVPQ

SEQ ID NO: 3190 - protein, 193 aa, Neisseria
  VARIANT (1)...(193): Xaa = Any Amino Acid
MGAGMVFVVFRPFSSLFRALFEDRVGIVEGAHDAAECDFLPEEFTRIRIGDVFIDSVGQVAARLFQAFGVNPGAFGVQQPAFRAREQARRGSGFFAGNDLRVPHKDAVEVDIDGGNTVSGHFLIRTHFDDGDAVCLFQAEARFAVNVAQHQYLVQINQVGIVDLIPVRVPQAAXIATGCTGICPKCPTGCRPV

SEQ ID NO: 3191 - protein, 237 aa, Neisseria
MELGHIVFLVLCARSDGLFTFQTFRQPAFAQDTARAFAAAADDTLVAGVGLFADVVQHAHFVRQRPRLRLGQVHQRRVDLKIVVHRQIKGNVHGFDEHAAAVGIARKIGFAHARDDVPDTLPFGKNGGVKQEKRVTPVHKGIGNAVVGGFDGGGFDGGGFVHQGVVRNLPHQAQIEYGLTDTQILRDPLCAFQLDGMALPVSEGDGLDVFAPVGLDCLNQAGGRILTAREDDQGFLV

SEQ ID NO: 3192 - protein, 232 aa, Neisseria
MELGHIVFLMVCACSDGLFTFQIFRQPAFAQDTARAFAAAADDAVIAGVGLLADIVQHAHFVRQRPRLRLGQIHQRRVDLKIIVHRQIKGNVHRFDKHVAAVGIAGEVGFAHARDDVPYPLPFGVNRGIEQEKRVAAVYKGIRNAVFGSFDGGGVVHQGIVRNLPHQAQVEYGLFDAQILRNPAGTFQLDGMALPVLESNGLDVFAPVGLDCLNQAGGRILTARKDDQGLLV

SEQ ID NO: 3193 - protein, 232 aa, Neisseria
MELGHIVFLMVCACSDGLFTFQIFRQPAFAQDTARAFAAAADDAVIAGVGLLADIVQRAHFVRQRPSLRLGQIHQRRVDLKIIVHRQIKGNVHGFDKHVTAVGIAGEVGFAHARDDVPYPLPFGVNRGIEQEKRVAAVYKGIRNAVFGSFDGGGVVHQGIVRNLPHQAQVEYGLFDAQILRNPAGTFQLDGMALPVLESNGLDVFAPVGLDCLNQAGGRILTARKDDQGFLV

SEQ ID NO: 3194 - protein, 182 aa, Neisseria
MARLTVHTLETAPEAAKPRVEAVPKNNGFIPNLIGVLANAPEALAFYQEVGKLNAANSLTAGEVEVIRIIAVRTNQCSFCVAGHTKLATLKKLLSEQSLNAARALAAGKSDDAKLGALAAFTQAVMAKKGAVSDDELNAFLEAGYNRQQAVEVVMGVALATLCNYANNLAQTEINPKLQAYA

SEQ ID NO: 3195 - protein, 77 aa, Neisseria
  VARIANT (1)...(77): Xaa = Any Amino Acid
AAGEFDDAKLGALAAFTAVMAKKGAVSDEELKAFFDAGYNQQQAVEVVMGVXLATLCNYVNNLGQTEINPELQAYAX

SEQ ID NO: 3196 - protein, 182 aa, Neisseria
MARLTVHTLETAPEAAKARVEAVLQNNGFIPNLIGVLSNAPEALAFYQEVGKLNAANSLTAGEVEVIQIIAARTNQCGFCVAGHTKLATLKKLLSEQSVKAARALAAGEFDDAKLGALAAFTQAVMAKKGAVSDEELKAFFDAGYNQQQAVEVVMGVALATLCNYVNNLGQTEINPELQAYA

SEQ ID NO: 3197 - protein, 228 aa, Neisseria
LTLTRKTLFLLTAAFGTHSLQTASADAVVKPEKLHASANRSYKVAEFTQTGNASWYGGRFHGRKTSGGDRYDMNAFTAAHKTLPIPSHVRVTNTKNGKSVIVRVNDRGPFHGNRIIDVSKAAAQKLGFVSQGTAHVKIEQIVPGQSAPVAENKDIFIDLKSFGTEHEAQAYLNQAAQNFAASSSSPNLSVEKRRYEYVVKMGPFASQERAAEAEAQARGMVRAVLTSG

SEQ ID NO: 3198 - protein, 239 aa, Neisseria
LTLTRKTLFLLTAAFGTHSLQTASADAVVKAEKLHASANRSYKVAGKRYTPKNQVAEFTQTGNASWYGGRFHGRKTSGGERYDMNAFTAAHKTLPIPSYVRVTNTKNGKSVIVRVNDRGPFHGNRIIDVSKAAAQKLGFVNQGTAHVKIEQIVPGQSAPVAENKDIFIDLKSFGTEHEAQAYLNQAAQNFAVSSSGTNLSVEKRRYEYVVKMGPFTSQERAAEAEAQARGMVRAVLTAG

SEQ ID NO: 3199 - protein, 239 aa, Neisseria
LTLTRKTLFLLTAAFGIHSFQTASADAVVRAEKLHASANRSYKVAGKRYTPKNQVAEFTQTGNASWYGGRFHGRKTSGGERYDMNAFTAAHKTLPIPSYVRVTNTKNGKSVIVRVNDRGPFHGNRIIDVSKAAAQKLGFVNQGTAHVKIEQIVPGQSAPVAENKDIFIDLKSFGTEHEAQAYLNQAAQNLASSASNPNLSVEKRRYEYVVKMGPFASQERAAEAEAQARGMVRAVLTAG

SEQ ID NO: 3200 - protein, 123 aa, Neisseria
  VARIANT (1)...(123): Xaa = Any Amino Acid
MSVILPPTRANAAFSAWARLMILSCLLCWCAACPWSSSPCPSWWASAGAEMLSSAVAAEVKRRCLMFIXFAFVNRGLENVDINKVSNNRQPAVNTARTIPRAXASASAARSCEVNGPILTTYS

SEQ ID NO: 3201 - protein, 119 aa, Neisseria
  VARIANT (1)...(119): Xaa = Any Amino Acid
MSVILPPTRANAAFSAWARLMILSCLLCWCAACPWSSSPCPSWWASAGAEMPISAVAAAVKRRRLKFIFAPAKYLXXCLKDVKAGHQPAVNTARTIPRAASASAARSCEANGPILTTYS

SEQ ID NO: 3202 - protein, 116 aa, Neisseria
MQFRRHRRRQCPNRKPIMTASMYILLVLALIFANAPFLTTRLFGVAALKRKHFGHHLIELAAGFALTASLAYILESRAGAVHNQGWEFYATVVCLYLIFAFPCFVRRYFWHTRNRE

SEQ ID NO: 3203 - protein, 120 aa, Neisseria
  VARIANT (1)...(120): Xaa = Any Amino Acid
MPFRNAFRRHRRRQRLNRKPTMTASMYILLVLALIFANAPFLTTRLFGVAXLKRKHFGHHMIELAAGFALTAVLAYILESRAGSVHDQGWEFYATVVCLYLIFAFPCFVWRYFWHTRNRE

SEQ ID NO: 3204 - protein, 120 aa, Neisseria
MPFRNAFRRHRRRQCPNRKPAMTASMYILLLLALIFANAPFLTTKLFGIVPLKRKHFGHHLIELAAGFALTAVLAYILESRAGAVHDQGWEFYATVVCLYLIFAFPCFVWRYFWHTRNRE

SEQ ID NO: 3205 - protein, 127 aa, Neisseria
MQVAFFLAVVFKNMGFHNRIGRAGLFAETAEDALGQVDVVTLGAAGAVFAFFRFDVDRHCRTHRLAQFTRDAAFLSVRKTALRVQTAETHGLRRFLFGKINCVFAGKKVFERYAHAFDQFAKQKGFY

SEQ ID NO: 3206 - protein, 127 aa, Neisseria
VQVAFFLAVVFKNMGFHNRISRACLFAETAEDALGQVDVVTLGAARTVFTFFRFDVNRHCRTHCLTQLTRDTPLFAVRIPPLRVQTAETHGLRRFLFGEINCVFAGEKVFERYAHTFYQFAKQKGFY

SEQ ID NO: 3207 - protein, 127 aa, Neisseria
VQVAFFLAVVFKNMGFHNRIGRAGFFAETAEDALGQVDVVTLGAARAVFAFFRFDVDRHCGANGFTQFTRDAAFLAVWITALRVQTAETHGLRRFLFGKINRVFAGKKVFERYAHTFYQFAKQKGFY

SEQ ID NO: 3208 - protein, 337 aa, Neisseria
MKKNLPALALASMLILSGCDRLGIGNPFSGKEISCGSEETKEILVKLVRDNVEGETVKTFDDDAFKDQAFADIGISHIRRMVERLGITVDEVRTTEKTDTSSKLKCEAALKLDVPDDVVDYAVAANQSIGNSHKKTPDFFEPYYRKEGAYYVKTISYSVQPTDDKSKIFAELSQAHDIIHPLSELVSMALIKEPLDKAKQRNEKLEAAEATAQEAREAEEAAAQEALGREQEAARVSEWEERYKLSRSEFEQFWKGLPQTVQNKLQASQKTWKSGMDKICANNAKAEGETPNGIKVSELACKTAETEARLEELHNRKKALIDEMVREEDKKELPKRL

SEQ ID NO: 3209 - protein, 140 aa, Neisseria
  VARIANT (1)...(140): Xaa = Any Amino Acid
MALIKEPLDKVKQRNEELEAAEEAAAQEALGREQEAARVSEWEERYKLSRXQFEQFWKGLPQTVQNKLQPSQKTWKSGMDKICANNAKAEGKTPNGIKFSELACKTAKTEARLEELHNRKKALIDEMXREADXKELSKRL

SEQ ID NO: 3210 - protein, 140 aa, Neisseria
MALIKEPLDKAKQRNEELEAAEEAAAQEALGREQEVDRVSEWEERYKLSRSEFEQFWKGLPQTVQNKLQASQKTWKSGMDKICANNAKAEGETPNGIKFSELACKTAETEARLEELHNRKKALLDEMAREADKKELPKRL

SEQ ID NO: 3211 - protein, 158 aa, Neisseria
VQSRYDGLHKFKHICSAAMALIKEPLDKVKQRNEELEAAEEAAAQEALGREQEAARVSEWEERYKLSRSEFEQFWKGLPQTVQNKLQASQKTWKSGMDKICANNAKAEGKTPNGIKFSELACKTAKTEARLEELHNRKKALIDEMAREADKKELSKRL

SEQ ID NO: 3212 - protein, 158 aa, Neisseria
VQSRYDGLHKFKHICSAAMALIKEPLDKAKQRNEELEAAEEAAAQEALGREQEVDRVSEWEERYKLSRSEFEQFWKGLPQTVQNKLQASQKTWKSGMDKICANNAKAEGETPNGIKFSELACKTAETEARLEELHNRKKALLDEMAREADKKELPKRL

SEQ ID NO: 3213 - protein, 121 aa, Neisseria
MVWRVNCAATAALIFSSSPWIWAVVWVWSRSAFSCKPCASLDASSAPALAVSPWDFIRNTASPKVSAALMHSFKTRALGRFSAPPVAILLSNRGVKKPLSFKSPSVQVDTSALLCLSLRSS

SEQ ID NO: 3214 - protein, 120 aa, Neisseria
MVWRVNCAATAVLIFSSSPWIWAAVWVWSRSALSCKPCATCPRPAPALMVSPWDFIQNTASPKVSAALMHSFKTRALGRFSSPPVAILLSERGVKKPLSFKFSSVQVDTSALLCLSLRSS

SEQ ID NO: 3215 - protein, 121 aa, Neisseria
MVWRVNCAATAVLIFSSSPWIWAAVWVWARSALSWRFCASVPASSAPALTVSPWDFIQNTASPKVSAALMHSFKTRALGRFSSPPVAILLSGRGVKKPLSFKFSSVQVDTSALLCLSLWSS

SEQ ID NO: 3216 - protein, 140 aa, Neisseria
MNKNRKLLLAALLLTAFAAFKLVLLQWWQAQQPQAVAAQCDLTEGCTLPDGSRVRAAAVSTKKPFDIYIEHAPAGTEQVSISFSMKNMDMGFNRYMFERQPSGTWQAARIRLPVCVEGRRDFTADITIGSRTFQTAFTAE

SEQ ID NO: 3217 - protein, 140 aa, Neisseria
  VARIANT (1)...(140): Xaa = Any Amino Acid
MNKNRKLLLAALLLIAFAAVKLVLLQWWQAXQPQAVAAQCDLTEGCTLPDGSRVRAAAVSTKKPFDIYIEHAPAGTEQVSISFSMKNMDMGFNRYMFERQPSGTWQAVRIRLPICVEGRRDFTADITIGSRTFQTAFTAE

SEQ ID NO: 3218 - protein, 140 aa, Neisseria; identical to SEQ ID NO: 1034

SEQ ID NO: 3219 - protein, 190 aa, Neisseria
MFSSRMARIWATGVTLCMVSPCPALTTKPKSPAKCAPFWMRSNCLICSAWLCASAYAPVCSSTTGAPTSRAAWICLSSASINKDTRMPASVRILANSAIFSCCANTSKPPSVVISCRFSGTMHTSSGITLSAFSSISSVNAISRFRRVRMAFLTANTSASLMWRRSSRRCMVIRSAPCVSATSAASTGLG

SEQ ID NO: 3220 - protein, 190 aa, Neisseria
  VARIANT (1)...(190): Xaa = Any Amino Acid
XFSSRMARIWAMGVTLCMVSPCPALTTKPKSPAKCAPFWMRSNCLICSAWLRASAYAPVCSSTTGAPTSRAAWICLSSASINKDTRMPASVRILVNPAIFSCCANTSKPPSVVISXRFSGTMHTSSGITFKAFSNISSVNAISRFRRVRMAFLTANTSASLMWRRSSRRCMVIKSAPCVSATSAASTGLG

SEQ ID NO: 3221 - protein, 189 aa, Neisseria
MFSSRMARIWAMGVTLCMVSPCPALTTKPKSLAKCAPFWMRSNCLICSAWLRASAYAPVCSSTTGAPTSRAAWICLSSASINKDTRMPASVRILVNSAILSCCANTSKPPSVVISRFSGTMHTSSGITLSAFSSISSVNAISRFRRVRMAFLTANTSASLMWRRSSRRCMVIRSAPCVSATSAASTGLG

SEQ ID NO: 3222 - protein, 370 aa, Neisseria
MTAKEELFAWLRHMNKNKGSDLFVTTHFPPAMKLDGKITRITDEPLTAEKCMEIAFSIMSAKQAEEFSSTNECNFAISLPDTSRFRVNAMIQRGATALVFRAITSKIPKFESLNLPPALKDVALKKRGLVIFVGGTGSGKSTSLASLIDYRNENSFGHIITIEDPIEFVHEHKNCIITQREVGVDTENWMAALKNTLRQAPDVILIGEIRDRETMDYAIAFAETGHLCMATLHANSTNQALDRIINFFPEERREQLLTDLSLNLQAFISQRLVPRDGGKGRVAAVEVLLNSPLISELIHNGNIHEIKEVMKKSTTLGMQTFDQHLYQLYEKGEISLQDALKNADSAHDLRLAVQLRSRRAQSSDPDLELL

SEQ ID NO: 3223 - protein, 370 aa, Neisseria
  VARIANT (1)...(370): Xaa = Any Amino Acid
MTAKEELFAWLRHMXQNKGSDLFVTTHFPPAMKLDGKITRITDEPLTAEKCMEIAFSIMSAKQAEEFSSTNECNFAISLPDTSRFRVNAMIQRGATALVFRTITSKIPKFESLNLPPVLKDVALKKRGLVIFVGGTGSGKSTSLASLIDYRNENSFGHIITIEDPIEFVHEHKNCIITQREVGVDTENWMAALKNTLRQAPDVILIGEIRDRETMDYAIAFAETGHLCMATLHANSTNQALDRIINFFPEERREQLLTDLSLNLQAFISQRLVPRDGGKGRVAAVEVLLNSPLISELIHNGNIHEIKEVMKKSTTLGMQTFDQHLYQLYEKGDISLQEALKNADSAHDLRLAVQLRSRRAQSXSPDLXLL

SEQ ID NO: 3224 - protein, 370 aa, Neisseria
MTAKEELFAWLRHMNKNKGSDLFVTTHFPPAMKLDGKITRITDEPLTAEKCMEIAFSIMSAKQAEEFSSTNECNFAISLPDTSRFRVNAMIQRGATALVFRAITSKIPKFESLNLPPVLKDVALKKRGLVIFVGGTGSGKSTSLASLIDYRNENSFGHIITIEDPIEFVHEHKNCIITQREVGVDTENWMAALKNTLRQAPDVILIGEIRDRETMDYAIAFAETGHLCMATLHANSTNQALDRIINFFPEERREQLLTDLSLNLQAFISQRLVPRDGGKGRVAAVEVLLNSPLISELIHNGNIHEIKEVMKKSTTLGMQTFDQHLYQLYEKGEISLQDALKNADSAHDLRLAVQLRSRQAQSSGPDLELL

SEQ ID NO: 3225 - protein, 171 aa, Neisseria
  VARIANT (1)...(171): Xaa = Any Amino Acid
MSLQAVFIYPPSRTAQYNENQENGGKAHKQGQSGKHTDRRQDIGVFEAGTPFTVFLPFLVAFEIKDDAGKQRGSRARHWHCVHCCSLTVKNPPGRATVLRREIAKFVCGRVPLKSRRFEKCFXRARPMCRNIICRSPAKSPRTRFAEFPRCPLVSYGVCLLFVFQAVFSYA

SEQ ID NO: 3226 - protein, 169 aa, Neisseria
  VARIANT (1)...(169): Xaa = Any Amino Acid
MSLQAVFIYPPSRTAQYNENQENGGKAHKQGQSGKHADRCQDIGVFKAGTPFPVFLPLLVAFEIKDDAGKQRGSRARHHCVHCCSLMLKNPPVRATVLRRQIAKFVCGRVPLKSGRFEGCSRRAALCAGVICRSPAKSPRTRFAEFPHCPLVSYGVYLPFVXQAVFSYA

SEQ ID NO: 3227 - protein, 168 aa, Neisseria
MSLQAVFVYPPSRTAQYNENQENGGKAHKQGQSGKHADRRQDIGVFQTGTPFTVFLPLFVAFEIKDDAGKQRGSRARHHNVHCCSLTVKNPPVRATVFKRRITKFVGGRALLQSGRFKGHDALPRVPDIICRSPAKLPRTRFAGFPHCPLVSYGVCLLFVFQAVFSYA

SEQ ID NO: 3228 - protein, 163 aa, Neisseria
MAGPIFVVIASVAMFFVAQQHATDLVTDDYYKDGKHIDIQLHRDEEAVRRHIGVQVLISPDMNAAKVFVGGEFDGKQPLNLLLMHPTRKADDQTVALKPVGSAQNGRAEYEAVFKTLPPANHWYVRVEDAAGVWRVENKWITSQGNAVDLTPMDKLFNNAGSK

SEQ ID NO: 3229 - protein, 163 aa, Neisseria; identical to SEQ ID NO: 1994

SEQ ID NO: 3230 - protein, 163 aa, Neisseria; identical to SEQ ID NO: 1994

SEQ ID NO: 3231 - protein, 278 aa, Neisseria
MILPPSMTMMRSADSTVVRRWATMMPVRFSIRRSSACWTRRSDSLSNALVASSNNNIGASFKMARAMATRCRCPPDKLLPFDPMGWCSPSGDASIRLCRLAAWRADRTSASPASGRLYRTFSNRVSSNRNTSWETRANWARRQSSLMSAMSIPSMQMLPADGSTKRGRRLTTVDLPLPERPTRATRSPCLMSRLKLSRALMPSERYSTSTLRKLMRPSTRCGASVPLSCSGGVSRNAHTPSAARNIVCIGMLMLARLLMGAYICSIATMNAINSPMVV

SEQ ID NO: 3232 - protein, 278 aa, Neisseria
MILPSSITMMRSAPSMVVRRWATMMPVRFSIRRSSACWTRRSDSLSNALVASSNNNIGASFKMARAMATRCRCPPDKLLPFDPMGWCSPSGELSIRLCRLAVWRANRTSASPASGRLYRTFSNRVSSNRNTSWETRANWARRQSSLMSAMSIPSMQMLPADGSTKRGSRLTTVDLPLPERPTRATRSPCLMSRLKLSRALMPSERYSTSTLRKLMRPSTRCGASVPLSCSGGVSRNAHTPSAARNIVCIGMLMLARLLMGAYICSIATMNAINSPMVV

SEQ ID NO: 3233 - protein, 278 aa, Neisseria
MILPSSITMMRSAPSMVVRRWATMMPVRFSIRRSSACWTRRSDSLSNALVASSNNNIGASFKMARAMATRCRCPPDKLLPFDPMGWCSPSGDASIRLCRLAAWRADRTSASPASGRLYRTFSNRVSSNRNTSWETRANWARRQSSLMSAMSIPSMQMLPADGSTKRGSRLTTVDLPLPERPTRATRSPCLMSRLKPSRALMPSERYSTSTLRKLMRPSTRCGASVPLSCSGGVSRNAHTPSAARNIVCIGMLMLARLLMGAYICSIATMNAINSPMVV

SEQ ID NO: 3234 - protein, 222 aa, Neisseria
MVHVAVAYGIAVRRFCPNEVIDVFHALQVHRQAFDAVGNFAEYGRAIDTADLLEIGKLGYFHAVEPDFPAQTPRTEGGVFPVVFDKADVVDFGIDAQFAQGVEIEVLDIGGGGFEGDLELVIVLQAVGVVAVAAVFGAAAGLDVGGKPRLGAERAQAGGGMGCAGTDFHVEGLDDGAAFVCPEGLQFEDDLLEGKHGLLFDKIKVLFYCFHSRLNRFISKTA

SEQ ID NO: 3235 - protein, 252 aa, Neisseria
MPRFEDKLVGRQGEGGVFFGKQAFGLRFVVVELAQQPVGIAVFEVVGGLLDFVLVVHVAVGDGVAVERFCPNEVVDVFYTLQVHRQAFDAVGDFAEYGRAVDAADLLEIGKLGYFHAVEPDFPAQTPRAEGGVFPVVFDKADVVDFGIDAQFAQRVEIEVLDIGGSGLEGDLELVIVLQAVGVVAVAAVFGAAAGLDVGGKPRLGAECAQAGGGMGCAGTDFHVEGLDDGAAFVCPECLQFEDDLLEGKHGL

SEQ ID NO: 3236 - protein, 252 aa, Neisseria
MPRFEDKLVGRQGEGGVFFGKQAFGLRFVVVELAQQPIGIAVFEVVGGLFDFVLVVHVAVSYCITVQRFCPNEVIDVFHALQVHRQAFDAVGDFAEYGGAVDAADLLEIGELGYFHTVEPDFPAQTPRAEGGVFPVVFDKADVVHFGVDAQFAQGVEIEVLDIGGSGLEGDLELVIVLQAVGVVAVATVFGAAAGLDVGGKPRLGAECAQTGGGMGCAGTDFHVEGLDDGAAFVCPECLQFEDDLLEGKHGL

SEQ ID NO: 3237 - protein, 170 aa, Neisseria
LRAITPGAIFSTGAVKVVLIGPLPSIGRPNASTTRPTNSRPTGTSKIRPVQVTVSPSLICSYSPNTTAPTESRSRFIAKPKVLPGNSSISPCIASDKPWMRTIPSVTEITVPRVLTSAFTDRFSILALIRSLISAGLSCMKTLLIRHSRVQSTQFALYRQIQNLITHFNF

SEQ ID NO: 3238 - protein, 219 aa, Neisseria
LRAITPGAIFSIGAVKVVLIGPLPSIGRPNASTTRPTSSRPTGTSKIRPVQVTVSPSLMCSYSPNTTAPTESRSRFIAKPKVLPGNSSISPCIASDKPWMRTIPSVTEITVPQVRTSAFTDRFSILALIKSLISAGLSCMKTLLIRHSRVQGTQFALYRQIQNLITHFNFYAANQLRFDFDRDFQLAVETLIQHLHQLADLFVGQRIGTVNDGRFDMVE

SEQ ID NO: 3239 - protein, 219 aa, Neisseria
LRAITPGAIFSIGAVKVVLIGPLPSIGRPNASTTRPTSSRPTGTSKIRPVQVTVSPSLICSCSPNTTAPTESRSRFIAKPKVLPGNSSISPCIASDKPWMRTIPSVTEITVPRVRTSAFTDRFSILALIKSLISAGLSCMKTLLIRHSRVQGTQFALYRQIQNLITHFNFYAANQLRFDFDRDFQLAVETLIQHLRQLADLFVGQRIGTVNDGRFDMVE

SEQ ID NO: 3240 - protein, 152 aa, Neisseria
MTRICGCLISTVLSVSASLSAAGFIRLQWEGTDTGSGRARLAPASLAAAMVRPTAAALPAITTCPGELKLTASTTSPCADSAQICLTCSSSKPKMAAIAPTPCGTADCISSARRRTSLTASAKSNASAATSAVYSPRLCPATAAGVLPPTSK

SEQ ID NO: 3241 - protein, 152 aa, Neisseria
ITRICGCLISTVFRASASLSAAGFIRLQWEGTDTGSGRARLAPASLAAAMARPTAAALPAITICPGELKLTASTTSLWAASAQMALTCSSSKPRIAAIAPTPCGTADCISSARRRTSLTASAKFNAPAATSAVYSPRLCPATAAGVLPPASK

SEQ ID NO: 3242 - protein, 152 aa, Neisseria
  VARIANT (1)...(152): Xaa = Any Amino Acid
MTXICGCLISTVXRASASLSAAGFMRLQWEGTDTGSGRARLAPASLAASIARSTAAALPAITTCPGELKLTASTTSSCADSAQICFTCSSSKPRIAAIAPTPCGTADCISSARXRTSLTASAKSNAPAATSAVYSPXLCPATAAGVLPPASE

SEQ ID NO: 3243 - protein, 308 aa, Neisseria
MKHLKLTLIAALLATAATAAPLPVVTSFSILGDVAKQIGGERVAVQSLVGANQDTHAYHMTSGDIKKIRSAKLVLLNGLGLEAADIQRAVKQSKVSYAEATKGIQPLKAEEEGGHHHDHHHDHDHDHEGHHHDHGEYDPHVWNDPVLMSDYAQNVAETLIKADPEGKVYYQQRLGNYQMQLKKLHSDAQAAFNAVPAAKRKVLTGHDAFSYMGNRYNISFIAPQGVSSEAEPSAKQVAAIIRQIKREGIKAVFTENIKDTRMVDRIAKETGVNVSGKLYSDALGNAPADTYIGMYRHNVEALTNAMKQ

SEQ ID NO: 3244 - protein, 304 aa, Neisseria; identical to SEQ ID NO: 1163

SEQ ID NO: 3245 - protein, 308 aa, Neisseria
MKHPKLTLIAALLTTAATAAPLPVVTSFSILGDVAKQIGGERVSIQSLVGANQDTHAYHMTSGDIKKIRSAKLVLINGLGLEAADIQRAVKQSKVSYAEATKGIQPLKAEEEGGHHHDHDHDHDHDHEGHHHDHGEYDPHVWNDPVLMSAYAQNVAEALIKADPEGKVYYQQRLGNYQMQLKKLHSDAQAAFNAVPAAKRKVLTGHDAFSYMGKRYHIEFIAPQGVSSEAEPSAKQVAAIIRQIKREGIKAVFTENIKDTRMVDRIAKETGVNVSGKLYSDALGNAPADTYIGMYRHNIKALTNAMKQ

SEQ ID NO: 3246 - protein, 275 aa, Neisseria
MHYALASVFCLSLSAAPVGVFLVMRRMSLIGDALSHAVLPGAAVGYMFAGLSLPAMGVGGFAAGMLMALLAGLVSRFTTLKEDANFAAFYLSSLAIGVILISKNGSSVDLLHLLFGSVLAVDIPALQLIAAVSGLTLITLAVIYRPLVLESIDPLFLKSVNGKGGLWHVIFLILVVMNLVSGFQALGILMSVGIMMLPAITARLWARNMGTLILLSVLIALFCGLIGLLISYHIEIPSGPAIILCCSVLYLFSVILGKEGGILPKWFKNHRHHTT

SEQ ID NO: 3247 - protein, 264 aa, Neisseria
MRYALASVFCLSLSAAPVGVFLVMRRMSLIGDALSHAVLPGAAVGYMFAGLSLPAMGLGGVAAGMLMALLAGLVSRFTTLKEDANFAAFYLSSLAIGVVLVSKNGSSVDLLHLLFGSVLAVDIPALQLIAAVSSLTLITLAVIYRPLVLESIDPLFLKSVGGKGGLWHVLFLVLVVMNLVSGFQALGTLMSVGLMMLPAITARLWAKHMGALILLSVLTALLCGLSGLLISYHIEIPSGPAIILCCSVLYLFSVILGKEGGILT

SEQ ID NO: 3248 - protein, 275 aa, Neisseria
MRYALASVFCLSLSAAPVGVFLVMRRMSLIGDALSHAVLPGAAVGYMFAGLSLPAMGLGGVAAGMLMALLAGLVSRFTTLKEDANFAAFYLSSLAIGVVLVSKNGSSVDLLHLLFGSVLAVDIPALQLIAAVSTLTLLTLAVIYRPLVLESIDPLFLKSVGGKGGLWHVLFLVLVVMNLVSGFQALGTLMSVGLMMLPAITARLWAKHMGALILLSVLTALLCGLSGLLISYHIEIPSGPAIILCCSVLYLFSVILGKEGGILTKWLKNHRHHTT

SEQ ID NO: 3249 - protein, 217 aa, Neisseria
MGLGMEIGKLIVALLVLINPFSALSLYLDLTNGHSTKERRKVARTAAVAVFAVIAVFALIGGALLKVLGISVGSFQVGGGILVLLIAISMMNGNDNPAKQNLGAQPETGQARPARNAGAIAVVPIAIPITIGPGGISTVIIYASAAKTYSDIALIIAAGLVVSAICYAILIVAGKVSRLLGATGLTILNRIMGMMLAAVSVEIIVSGLKTIFPQLAG

SEQ ID NO: 3250 - protein, 217 aa, Neisseria; identical to SEQ ID NO: 1901

SEQ ID NO: 3251 - protein, 217 aa, Neisseria
MGLGMEIGKLIVAFLVLINPFSALSLYLDLTNGHSTKERRKVARTAAVAVFAVIAVFALIGGTLLKVLGISVGSFQVGGGILVLLIAISMMNGNDNPAKQNLGAQPETGQVRPARNAGAIAVVPIAIPITIGPGGISTVIIYASAAKTYGDIALIIAAGLVVSAICYAILIVAGKVSRLLGATGLTILNRIMGMMLAAVSVEIIVSGLKMIFPQLAG

SEQ ID NO: 3252 - protein, 142 aa, Neisseria
MNFALSVITFTLASFLPVPPAGTAVFTWKDGGGNSYSDVPKQLHPDQSQILNLRTLQTKPAVKPKPAVDTNADSAKENEKDIAEKNGQLEEEKKKIAETERQNKEENCRISKMNLKAVGNSNAKNKDDLIRKYNNAVNKYCR

SEQ ID NO: 3253 - protein, 144 aa, Neisseria; identical to SEQ ID NO: 1899

SEQ ID NO: 3254 - protein, 144 aa, Neisseria; identical to SEQ ID NO: 1899

SEQ ID NO: 3255 - protein, 298 aa, Neisseria
MPSETRNRFQTALVYAAGWGLAVFVTAFAFACKRVAGFAFAFEAFAGFFETVFLKAFFLETFAARFAAEAFFARFMIAAPAAGFPIAPAAFAFRLAACGFAFAGRLHAFDGQFGQFAVNVFFDFVDFDVFVHFGKRNRNTRAACAAGAPDAVDVVFRLFRQVVVYDVGNGRYVNTACGNVGGNQNFAAAFTQIRQRAVAPALRHIAVQAVGGETFFVQFIRDDFGHRFGGRENHTLVDVGIAQDVVEQAVFVAHIVAVQQLLFDFALAVHAFDFDNFRVFGQFARQFADCAVPSGGEQ

SEQ ID NO: 3256 - protein, 424 aa, Neisseria
MPSETRNRFQTALVYAAGWGLAVFVTAFAFACKRIAGFAFAFEAFAGFFETVSLKAFFLETFAARFAAEAFFARFMIAAPTAGFTIAPAAFAFRLAACGFAFAGRFHAFDGQFGQFSVNVFFDFVDFDVFVHFGKRNRNTRAACAAGAPDAVDVVFRLFRQVVVDNVGNGRYVDTACGNIGGNQNFAAAFTQIHQRAVAPALRHIAVQAVCGETFFVQFIRNDFGHGFGGRENHALIDIGIAQDMIEQAVFVAHIVAVQQLFFDFALIVHAFDFDDFRVFGQFARQFADRAVPSGGEQQSLTVARRCFHDGFDVVDKAHIQHTVGFVQNQHFQTFKINFAALHQVHQTARRGDNQIDRFAQGTGLVAERRAADDADGAEPTHIFGIRQRVFLDLSRQFAGRGQHQSTRAFARFFAAFGQFLQSR

SEQ ID NO: 3257 - protein, 424 aa, Neisseria
MPSETRNRFQTALVYAAGWGLAVFVTAFAFACKRIAGFAFAFEAFAGFFETVSLKAFFLETFAARFAAEAFFARFMIAAPTAGFTIAPAAFAFRLAACGFAFAGRFHAFDGQFGQFSVNVFFDFVDFDVFVHFGKRNRNTRAACAAGAPDAVDVVFRLFRQVVVDNVGNGRYVDTACGNVGGNQNFAAAFAQIHQRAVAPALRHIAVQAVGGETFFVQFIRDDFGHGFGGRENHALIDVGIAQDMIEQAVFVAHIVAVQQLFFDFALVVHAFDFDDFRVFGQFARQFADRAVPSGGEQQSLTVFRRGFDDGFDVVDKAHIQHTVGFVQNQHFQAGEIDFAALHQVHQTARRGDNQIDRFAQGAGLVAERCTTDDADGTEPTHIFGIRQRVFLDLSRQFAGRRQHQRARAFARFFAAFGQSLQSR

SEQ ID NO: 3258 - protein, 1389 aa, Neisseria
MTDTTPTDTDPTENGTRKMPSEHRPAPPAKKRRPLLKLSAALLSVLILAVCFLGWIAGTEAGLRFGLYQIPSWFGVNISSQNLKGTLLDGFDGDNWSIETEGADLKISRFRFAWKPSELMRRSLHITDISAGDIAIVTKPTPPKEERPPQGLPDSIDLPAAVYLDRFETGKISMGKTFDKQTVYLERLNAAYRYDRKGHRLDLKAADTPWSSSSGSASVGLKKPFALDTAIYTKGGFEGETIHSTARLSGSLKDVRAELTIDGGNIRLSGKSVIHPFAESLDKTLEEVLVKGFNINPSAFVPSLPDAGLNFDLTAIPSFSDGIALEGSLDLENTKAGFADRNGIPVRQVLGGFVIRQDGTVHIGNTSAALLGRGGIRLSGKIDTEKDILDLNIGINSVGAEDVLQTAFKGRLDGSIGIGGTTASPKISWQLGTGTARTDGSLPIASDPANEQRKLVFDTVNISAGEGSLTAQGYLELFKDRLLKLDIRSRAFDPSRIDPQFPAGNINGSIHLAGELAKEKFTGKMRFLPGTFNGVPIAGSADIVYESRHLPRAAVDLRLGRNIVKTDGGFGKKGDRLNLNITAPDLSRFGFGLAGSLNVRGHLSGDLDGGIRTFETDLSGTARNLHIGKAADIRSLDFTLKGSPGTSRPMRADIKGGRLSLSGGAAVVDTAGLTLEGTGAQHRIRTHAAMTLDGKPFKLDLDASGGINRELTRWKGSIGILDIGGAFNLKLQNRMTLEAGAEHVAASAANWQAMGGSLNLQHFSWDRKTGISAKGGARGLHIAELHNFFKPPFEHNLVLNGDWDVAYGHNARGYLNISRQSGDAVLPGGQALGLNAFSLKTRFQNDRIGILLDGGARFGRINADLGIGNAFGGNMANTPLGGRITASLPDLGALKPFLPAAAQNITGSLNASAQIGGRVGSPSVNAAVNGSSNYGKINGNITVGQSRSFDTAPLGGRLNLTVADAEAFRNFLPVGQTVKGSLNAAVTLGGSIADPHLGGSINGDKLYYRNQTQGIILDNGSLRSHIAGRKWVIDSLKFRHEGTAELSGTVSMENSVPDVDIGAVFDKYRILSRPNRRLTVSGNTRLRYSPQKGISVTGMIKTDQGLFGSQKSSMPSVGDDVVVLGEVKKEAAASLPVNMNLTLDLNDGIRFSGYGADVTIGGKLTLTAQPGGNVRGVGTVRVIKGRYKAYGQDLDITKGTVSFVGPLNDPNLNIRAERRLSPVGAGVEILGSLNSPRITLTANEPMSEKDKLSWLILNRAGSGSSGDNAALSAAAGALLAGQINDRIGLVDDLGFTSKRSRNAQTGELNPAEQVLTVGKQLTGKLYIGYEYGISSAEQSVKLIYRLTRAIQAVARIGSRSSGGELTYTIRFDRLFGSDKKDSAGNGKGK

SEQ ID NO: 3259 - protein, 1389 aa, Neisseria
MTDTAPTDTDPTENGTRKMPSEHRPTPPAKKRRPLLKLSAALLSVLILAVCFLGWLAGTEAGLRFGLYQIPSWFGVNISSQNLKGTLLDGFDGDNWSIETEGADLKISRFRFAWKPSELMRRSLHITEISAGDIAIVTKPTPPKEERPPLSLPDSIDLPAAVYLDRFETGKISMGKAFDKQTVYLERLDASYRYDRKGHRLDLKAADTPWSSSSGAASVGLKKPFALDTAIYTKGGLEGKTIHSTARLSGSLKDVRAELAIDGGNIRLSGKSVIHPFAESLDKTLEEVLVKGFNINPAAFVPSLPDAGLNFDLTAIPSFSDGIALEGSLDLENTKAGFADRNGIPVRQVLGGFVIRQDGTVHIGNTSAALLGRGGIRLSGKIDTEKDILDLNIGINSVGAEDVLQTAFKGRLDGSIGIGGTTASPKISWQLGIGTARTDGSLAIASDPANGQRKLVLDTVNIAAGQGSLTAQGYLELFKDRLLKLDIRSRAFDPSRIDPQLPAGNINGSINLAGELAKEKFTGKMRFLPGTFNGVPIAGSADIVYESRHLPRAAVDLRLGRNIIKTDGGFGKKGDRLNLNITAPDLSRFGFGLAGSLNVRGHLSGDLDGGIRTFETDLSGAARNLHIGKAADIRSLDFTLKGSPDTSRPIRADIKGSRLSLSGGAAVVDTADLMLDGTGVQHRIRTHAAMTLDGKPFKFDLDASGGINRELTRWKGSIGILDIGGAFNLKLQNRMTLEAGAERVAASAANWQAMGGSLNLQHFSWDKKTGISAKGGAHGLHIAELHNFFKPPFEHNLVLNGDWDVAYGRNARGYLNISRQSGDAVLPGGQALGLNAFSLKTRFQNDRIGILLDGGARFGRINADLGIANAFGGNMANAPLGGRITASLPDLGALKPFLPAAAQNITGSLNAAAQIGGRVGSPSVNAAVNGSSNYGKINGNITVGQSRSFDTAPLGGRLNLTVADAEVFRNFLPVGQTVKGSLNAAVTLGGSIADPHLGGSINGDKLYYRNQTQGIILDNGSLRSHIAGRKWVIDSLKFRHEGTAELSGTVGMENSGPDVDIGAVFDKYRILSRPNRRLTVSGNTRLRYSPQKGISVTGMIKTDQGLFGSQKSSMPSVGDDVVVLGEVKKEAAAPLPVNMNLTLDLNDGIRFAGYGADVTIGGKLTLTAQSGGSVRGVGTVRVIKGRYKAYGQDLDITKGTVSFVGPLNDPNLNIRAERRLSPVGAGVEILGSLNSPRITLTANEPMSEKDKLSWLILNRAGSGSSGDNAALSAAAGALLAGQINDRIGLVDDLGFTSKRSRNAQTGELNPAEQVLTVGKQLTGKLYIGYEYSISSAEQSVKLIYRLTRAIQAVARIGSRSSGGELTYTIRFDRFSGSDKKDSAGNGKGK

SEQ ID NO: 3260 - protein, 1389 aa, Neisseria
MTDTAPTDTDPTENGTRKMPSEHRPTPPAKKRRPLLKLSAALLSVLILAVCFLGWLAGTEAGLRFGLYQIPSWFGVNISSQNLKGTLLDGFDGDNWSIETEGADLKISRFRFAWKPSELMRRSLHITEISAGDIAIVTKPTPPKEERPPLSLPDSIDLPAAVYLDRFETGKISMGKAFDKQTVYLERLDASYRYDRKGHRLDLKAADTPWSSSSGSASVGLKKPFALDTAIYTKGGLEGKTIHSTARLSGSLKDVRAELAIDGGNIRLSGKSVIHPFAESLDKTLEEVLVKGFNINPSAFVPSLPDAGLNFDLTAIPSFSDGIALEGSLDLENTKAGFADRNGIPVRQVLGSFVIRQDGTVHIGNTSVALLGRGGIRLSGKIDTEKDILDLNIGINSVGAEDVLQTAFKGRLDGSIGIGGTTASPKISWQLGIGTARTDGSLAIASDPANGQRKLVLDTVNIAAGQGSLTAQGYLELFKDRLLKLDIRSRAFDPSRIDPQLPAGNINGSINLAGELAKEKFTGKMRFLPGTFNGVPIAGSADIVYESRHLPRAAVDLRLGRNIIKTDGGFGKKGDRLNLNITAPDLSRFGFGLAGSLNVRGHLSGDLDGGIRTFETDLSGAARNLHIGKAADIRSLDFTLKGSPDTSRPIRADIKGSRLSLSGGAEVVDTADLMLDGTGVQHRIRTHAAMTLDGKPFKFDLDASGGINRELTRWKGSIGILDIGGAFNLKLQNRMTLEAGAERVAASAANWQAMGGSLNLQHFSWDKKTGISAKGGAHGLHIAELHNFFKPPFEHNLVLNGDWDVAYGRNARGYLNISRQSGDAVLPGGQALGLNAFSLKTRFQNDRIGILLDGGARFGRINADLDIGNAFGGNMANAPLGGRITASLPDLGTLKPFLPAAAQNITGSLNAAAQIGGRVGSPSVNAAVNGSSNYGKINGNITVGQSRSFDTAPLGGRLNLTVADAEVFRNFLPVGQTVKGSLNAAVTLGGSIADPHLGGSINGDKLYYRNQTQGIILDNGSLRSHIAGRKWVIDSLKFRHEGTAELSGTVGMENSGPDVDIGAVFDKYRILSRPNRRLTVSGNTRLRYSPQKGISVTGMIKTDQGLFGSQKSSMPSVGDDVVVLGEVKKEAAAPLPVNMNLTLDLNDGIRFAGYGADVTIGGKLTLTAQSGGSVRGVGTVRVIKGRYKAYGQDLDITKGTVSFVGPLNDPNLNIRAERRLSPVGAGVEILGSLNSPRITLTANEPMSEKDKLSWLILNRAGSGSSGDNAALSAAAGALLAGQINDRIGLVDDLGFTSKRSRNAQTGELNPAEQVLTVGKQLTGKLYIGYEYSISSAEQSVKLIYRLTRAIQAVARIGSRSSGGELTYTIRFDRFSGSDKKDSAGNSKGK

SEQ ID NO: 3261 - protein, 1354 aa, Neisseria
LKLSAALLSVLILAVCFLGWIAGTEAGLRFGLYQIPSWFGVNISSQNLKGTLLDGFDGDNWSIETEGADLKISRFRFAWKPSELMRRSLHITDISAGDIAIVTKPTPPKEERPPQGLPDSIDLPAAVYLDRFETGKISMGKTFDKQTVYLERLNAAYRYDRKGHRLDLKAADTPWSSSSGSASVGLKKPFALDTAIYTKGGFEGETIHSTARLSGSLKDVRAELTIDGGNIRLSGKSVIHPFAESLDKTLEEVLVKGFNINPSAFVPSLPDAGLNFDLTAIPSFSDGIALEGSLDLENTKAGFADRNGIPVRQVLGGFVIRQDGTVHIGNTSAALLGRGGIRLSGKIDTEKDILDLNIGINSVGAEDVLQTAFKGRLDGSIGIGGTTASPKISWQLGTGTARTDGSLAIASDPANEQRKLVFDTVNISAGEGSLTAQGYLELFKDRLLKLDIRSRAFDPSRIDPQFPAGDINGSIHLAGELAKEKFTGKMRFLPGTFNGVPIAGSADIVYESRHLPRAAVDLRLGRNIVKTDGGFGKKGDRLNLNITAPDLSRFGFGLAGSLNVRGHLSGDLDGGIRTFETDLSGTARNLHIGKAADIRSLDFTLKGSPGTSRPMRADIKGGRLSLSGGAAVVDTAGLTLEGTGAQHRIRTHAAMTLDGKPFKLDLDASGGINRELTRWKGSIGILDIGGAFNLKLQNRMTLEAGAEHVAASAANWQAMGGSLNLQHFSWDRKTGISAKGGARGLHIAELHNFFKPPFEHNLVLNGDWDVAYGHNARGYLNISRQSGDAVLPGGQALGLNAFSLKTRFQNDRIGILLDGGARFGRINADLGIGNAFGGNMANTPLGGRITASLPDLGALKPFLPAAAQNITGSLNASAQIGGRVGSPSVNAAVNGSSNYGKINGNITVGQSRSFDTAPLGGRLNLTVADAEAFRNFLPVGQTVKGSLNAAVTLGGSIADPHLGGSINGDKLYYRNQTQGIILDNGSLRSHIAGRKWVIDSLKFRHEGTAELSGTVSMENSVPDVDIGAVFDKYRILSRPNRRLTVSGNTRLRYSPQKGISVTGMIKTDQGLFGSQKSSMPSVGDDVVVLGEVKKEAAASLPVNMNLTLDLNDGIRFSGYGADVTIGGKLTLTAQPGGNVRGVGTVRVIKGRYKAYGQDLDITKGTVSFVGPLNDPNLNIRAERRLSPVGAGVEILGSLNSPRITLTANEPMSEKDKLSWLILNRAGSGSSGDNAALSAAAGALLAGQINDRIGLVDDLGFTSKRSRNAQTGELNPAEQVLTVGKQLTGKLYIGYEYGISSAEQSVKLIYRLTRAIQAVARIGSRSSGGELTYTIRFDRLFGSDKKDSAGNGKGK

SEQ ID NO: 3262 - protein, 1354 aa, Neisseria
LKLSAALLSVLILAVCFLGWLAGTEAGLRFGLYQIPSWFGVNISSQNLKGTLLDGFDGDNWSIETEGADLKISRFRFAWKPSELMRRSLHITEISAGDIAIVTKPTPPKEERPPLSLPDSIDLPAAVYLDRFETGKISMGKAFDKQTVYLERLDASYRYDRKGHRLDLKAADTPWSSSSGAASVGLKKPFALDTAIYTKGGLEGKTIHSTARLSGSLKDVRAELAIDGGNIRLSGKSVIHPFAESLDKTLEEVLVKGFNINPAAFVPSLPDAGLNFDLTAIPSFSDGIALEGSLDLENTKAGFADRNGIPVRQVLGGFVIRQDGTVHIGNTSAALLGRGGIRLSGKIDTEKDILDLNIGINSVGAEDVLQTAFKGRLDGSIGIGGTTASPKISWQLGIGTARTDGSLAIASDPANGQRKLVLDTVNIAAGQGSLTAQGYLELFKDRLLKLDIRSRAFDPSRIDPQLPAGNINGSINLAGELAKEKFTGKMRFLPGTFNGVPIAGSADIVYESRHLPRAAVDLRLGRNIIKTDGGFGKKGDRLNLNITAPDLSRFGFGLAGSLNVRGHLSGDLDGGIRTFETDLSGAARNLHIGKAADIRSLDFTLKGSPDTSRPIRADIKGSRLSLSGGAAVVDTADLMLDGTGVQHRIRTHAAMTLDGKPFKFDLDASGGINRELTRWKGSIGILDIGGAFNLKLQNRMTLEAGAERVAASAANWQAMGGSLNLQHFSWDKKTGISAKGGAHGLHIAELHNFFKPPFEHNLVLNGDWDVAYGRNARGYLNISRQSGDAVLPGGQALGLNAFSLKTRFQNDRIGILLDGGARFGRINADLGIANAFGGNMANAPLGGRITASLPDLGALKPFLPAAAQNITGSLNAAAQIGGRVGSPSVNAAVNGSSNYGKINGNITVGQSRSFDTAPLGGRLNLTVADAEVFRNFLPVGQTVKGSLNAAVTLGGSIADPHLGGSINGDKLYYRNQTQGIILDNGSLRSHIAGRKWVIDSLKFRHEGTAELSGTVGMENSGPDVDIGAVFDKYRILSRPNRRLTVSGNTRLRYSPQKGISVTGMIKTDQGLFGSQKSSMPSVGDDVVVLGEVKKEAAAPLPVNMNLTLDLNDGIRFAGYGADVTIGGKLTLTAQSGGSVRGVGTVRVIKGRYKAYGQDLDITKGTVSFVGPLNDPNLNIRAERRLSPVGAGVEILGSLNSPRITLTANEPMSEKDKLSWLILNRAGSGSSGDNAALSAAAGALLAGQINDRIGLVDDLGFTSKRSRNAQTGELNPAEQVLTVGKQLTGKLYIGYEYSISSAEQSVKLIYRLTRAIQAVARIGSRSSGGELTYTIRFDRFSGSDKKDSAGNGKGK

SEQ ID NO: 3263 - protein, 1354 aa, Neisseria
LKLSAALLSVLILAVCFLGWLAGTEAGLRFGLYQIPSWFGVNISSQNLKGTLLDGFDGDNWSIETEGADLKISRFRFAWKPSELMRRSLHITEISAGDIAIVTKPTPPKEERPPLSLPDSIDLPAAVYLDRFETGKISMGKAFDKQTVYLERLDASYRYDRKGHRLDLKAADTPWSSSSGSASVGLKKPFALDTAIYTKGGLEGKTIHSTARLSGSLKDVRAELAIDGGNIRLSGKSVIHPFAESLDKTLEEVLVKGFNINPSAFVPSLPDAGLNFDLTAIPSFSDGIALEGSLDLENTKAGFADRNGIPVRQVLGSFVIRQDGTVHIGNTSVALLGRGGIRLSGKIDTEKDILDLNIGINSVGAEDVLQTAFKGRLDGSIGIGGTTASPKISWQLGIGTARTDGSLAIASDPANGQRKLVLDTVNIAAGQGSLTAQGYLELFKDRLLKLDIRSRAFDPSRIDPQLPAGNINGSINLAGELAKEKFTGKMRFLPGTFNGVPIAGSADIVYESRHLPRAAVDLRLGRNIIKTDGGFGKKGDRLNLNITAPDLSRFGFGLAGSLNVRGHLSGDLDGGIRTFETDLSGAARNLHIGKAADIRSLDFTLKGSPDTSRPIRADIKGSRLSLSGGAEVVDTADLMLDGTGVQHRIRTHAAMTLDGKPFKFDLDASGGINRELTRWKGSIGILDIGGAFNLKLQNRMTLEAGAERVAASAANWQAMGGSLNLQHFSWDKKTGISAKGGAHGLHIAELHNFFKPPFEHNLVLNGDWDVAYGRNARGYLNISRQSGDAVLPGGQALGLNAFSLKTRFQNDRIGILLDGGARFGRINADLDIGNAFGGNMANAPLGGRITASLPDLGTLKPFLPAAAQNITGSLNAAAQIGGRVGSPSVNAAVNGSSNYGKINGNITVGQSRSFDTAPLGGRLNLTVADAEVFRNFLPVGQTVKGSLNAAVTLGGSIADPHLGGSINGDKLYYRNQTQGIILDNGSLRSHIAGRKWVIDSLKFRHEGTAELSGTVGMENSGPDVDIGAVFDKYRILSRPNRRLTVSGNTRLRYSPQKGISVTGMIKTDQGLFGSQKSSMPSVGDDVVVLGEVKKEAAAPLPVNMNLTLDLNDGIRFAGYGADVTIGGKLTLTAQSGGSVRGVGTVRVIKGRYKAYGQDLDITKGTVSFVGPLNDPNLNIRAERRLSPVGAGVEILGSLNSPRITLTANEPMSEKDKLSWLILNRAGSGSSGDNAALSAAAGALLAGQINDRIGLVDDLGFTSKRSRNAQTGELNPAEQVLTVGKQLTGKLYIGYEYSISSAEQSVKLIYRLTRAIQAVARIGSRSSGGELTYTIRFDRFSGSDKKDSAGNSKGK

SEQ ID NO: 3264 - protein, 522 aa, Neisseria
MQNTGTMMIKPTALLLPALFFFPHAYAPAADLSENKAAGFALFKSKSPDTESVKLKPKFPVRIDTQDSEIKDMVEEHLPLITQQQEEVLDKEQTGFLAEEAPDNVKTMLRSKGYFSSKVSLTEKDGAYTVHITPGPRTKIANVGVAILGDILSDGNLAEYYRNALENWQQPVGSDFDQDSWENSKTSVLGAVTRKGYPLAKLGNTRAAVNPDTATADLNVVVDSGRPIAFGDFEITGTQRYPEQTVSGLARFQPGTPYDLDLLLDFQQALEQNGHYSGASVQADFDRLPRGPRPRQSQRNRGQTPQTRNRHPPRFGIRFGRQNRLRLLQPLQQRLYRLGRLGYGQIRNHACRRHQPAAQLSGQLLDKQRFLQPFDHPKPRKTRLLRRHLVCARPRGHRCQAGGGISRRRPENPRLGCRFGQQPRHDADRLLETPAAQQRAAPRKRPLPRRQNRDDFGHIPVLHRANPHLCPRRLFLHARKQKTRHVHHTRTSGLHRCTRQCRCPLGADVPQRRRVFRARLRT

SEQ ID NO: 3265 - protein, 615 aa, Neisseria
MHDTRTMMIKPTALLLPALFFFPHAYAPAADLSENKAAGFALFKNKSPDTESVKLKPKFPVLIDTQDSEIKDMVEEHLPLITQQQEEVLDKEQTGFLAEEAPDNVKTMLRSKGYFSSKVSLTEKDGAYTVHITPGPRTKIANVGVAILGDILSDGNLAEYYRNALENWQQPVGSDFDQDSWENSKTSVLGAVTRKAYPLAKLGNTQAAVNPDTATADLNVVVDSGRPIAFGDFEITGTQRYPEQIVSGLARFQPGMPYDLDLLLDFQQALEQNGHYSGASVQADFDRLQGDRVPVKVSVTEVKRHKLETGIRLDSEYGLGGKIAYDYYNLFNKGYIGSVVWDMDKYETTLAAGISQPRNYRGNYWTSNVSYNRSTTQNLEKRAFSGGVWYVRDRAGIDARLGAEFLAEGRKIPGSAVDLGNSHATMLTASWKRQLLNNVLHPENGHYLDGKIGTTLGTFLSSTALIRTSARAGYFFTPENKKLGTFIIRGQAGYTVARDNADVPSGLMFRSGGASSVRGYELDSIGLAGPNGSVLPERALLVGSLEYQLPFTRTLSGAVFHDMGDAAANFKRMKLKHGSGLGVRWFSPLAPFSFDIAYGHSDKKIRWHISLGTRF

SEQ ID NO: 3266 - protein, 615 aa, Neisseria
MHDTRTMMIKPTALLLPALFFFPHAYAPAADLSENKAAGFALFKNKSPDTESVKLKPKFPVRIDTQDSEIKDMVEEHLPLITQQQEEVLDKEQTGFLAEEAPDNVKTMLRSKGYFSSKVSLTEKDGAYTVHITPGPRTKIANVGVAILGDILSDGNLAEYYRNALENWQQPVGSDFDQDSWENSKTSVLGAVTRKAYPLAKLGNTRAAVNPDTATADLNVVVDSGRPIAFGDFEITGTQRYPEQIVSGLARFQPGTPYDLDLLLDFQQALEQNGHYSGASVQADFDRLQGDRVPVKVSVTEVKRHKLETGIRLDSEYGLGGKIAYDYYNLFNKGYIGSVVWDMDKYETTLAAGISQPRNYRGNYWTSNVSYNRSTTQNLEKRAFSGGIWYVRDRAGIDARLGAEFLAEGRKIPGSDIDLGNSHATMLTASWKRQLLNNVLHPENGHYLDGKIGTTLGAFLSSTALIRTSARAGYFFTPENKKLGTFIIRGQAGYTVARDNANVPSGLMFRSGGASSVRGYELDSIGLAGPNGSVLPERALLVGSLEYQLPFTRTLSGAVFHDMGDAAANFKRMKLKHGSGLGVRWFSPLAPFSFDIAYGHSDKKIRWHISLGTRF

SEQ ID NO: 3267 - protein, 429 aa, Neisseria
MFKRSVIAMACIFPLSACGGGGGGSPDVKSADTPSKPAAPVVAENAGEGVLPKEKKDEEAAGGAPQADTQDATAGEGSQDMAAVSAENTGNGGAATTDNPKNEDAGAQNDMPQNAAESANQTGNNQPAGSSDSAPASNPAPANGGSDFGRTNVGNSVVIDGPSQNITLTHCKGDSCNGDNLLDEEAPSKSEFEKLSDEEKIKRYKKDEQRENFVGLVADRVKKDGTNKYIIFYTDKPPTRSARSRRSLPAEIPLIPVNQADTLIVDGEAVSLTGHSGNIFAPEGNYRYLTYGAEKLPGGSYALRVQGEPAKGEMLVGTAVYNGEVLHFHMENGRPYPSGGRFAAKVDFGSKSVDGIIDSGDDLHMGTQKFKAAIDGNGFKGTWTENGGGDVSGRFYGPAGEEVAGKYSYRPTDAEKGGFGVFAGKKDRD

SEQ ID NO: 3268 - protein, 488 aa, Neisseria; identical to SEQ ID NO: 538

SEQ ID NO: 3269 - protein, 497 aa, Neisseria
MFKRSVIAMACIVALSACGGGGGGSPDVKSADTLSKPAAPVVTEDVGEEVLPKEKKDEEAVSGAPQADTQDATAGKGGQDMAAVSAENTGNGGAATTDNPENKDEGPQNDMPQNAADTDSSTPNHTPAPNMPTRDMGNQAPDAGESAQPANQPDMANAADGMQGDDPSAGENAGNTADQAANQAENNQVGGSQNPASSTNPNATNGGSDFGRINVANGIKLDSGSENVTLTHCKDKVCDRDFLDEEAPPKSEFEKLSDEEKINKYKKDEQRENFVGLVADRVEKNGTNKYVIIYKDKSASSSSARFRRSARSRRSLPAEMPLIPVNQADTLIVDGEAVSLTGHSGNIFAPEGNYRYLTYGAEKLSGGSYALSVQGEPAKGEMLAGTAVYNGEVLHFHMENGRPSPSGGRFAAKVDFGSKSVDGIIDSGDDLHMGTQKFKAVIDGNGFKGTWTENGGGDVSGRFYGPAGEEVAGKYSYRPTDAEKGGFGVFAGKKEQD

SEQ ID NO: 3270 - protein, 182 aa, Neisseria
MHTGQAVSRVLSRTVIPLGIPLPVCSSNLPERSAGSVIAFCLVLLRMGFGLPHIVTKCAVRPYRTFSPLPVLPKQPSAVLLSVPLSVALPRPAVNRHSTLRSPDFPPRMPYAIRGDCLPVPCAARIITRNAKMPSETVQVSDGIQPKLHTLFQAGFDEAVQVAVQYGFVVADFVACTQVFDA

SEQ ID NO: 3271 - protein, 182 aa, Neisseria
MHTGQAVSRVLSRTVIPLGIPLPVCSSNLPERSAGSVIAFCLVLLRMGFGLPHIVTKCAVRPYRTFSPLPVLPKQPSAVLLSVPLSVALPRPAVNRHSTLRSPDFPPRMPYAIRGDCLPVPCAARIITRNTKMPSETVQVSDGIQPKLHALFQAGFDEAVQVAIQYGFGVADFVACTQVFDT

SEQ ID NO: 3272 - protein, 182 aa, Neisseria
MHTGQAVSRVLSRTVIPLGIPLPVCSSNLPERSAGSVIAFCLVLLRMGFGLPHIVTKCAVRPYRTFSPLPVLPKQPSAVLLSVPLSVALPRPAVNRHSTLRSPDFPPRMPYAIRGDCLPVPCAARIITRNAKMPSETVQVSDGIQPKLHALFQAGFDKAVQVAVQYGFGVADFVACAQVFNA

SEQ ID NO: 3273 - protein, 392 aa, Neisseria; identical to SEQ ID NO: 386

SEQ ID NO: 3274 - protein, 334 aa, Neisseria; identical to SEQ ID NO: 384

SEQ ID NO: 3275 - protein, 392 aa, Neisseria; identical to SEQ ID NO: 385

SEQ ID NO: 3276 - protein, 265 aa, Neisseria
MKTKLIKILTPFTVLPLLACGQTPVSNANAESAVKAESAGKSVAASLKARLEKTYSAQDLKVLSVSETPVKGIYEVVVSGRQIIYTDAEGGYMFVGELINIDTRKNLTEERAADLNKIDFASLPLDKAIKEVRGNGKLKVAVFSDPDCPFCKRLEHEFEKMTDVTVYSFMMPIAGLHPDAARKAQILWCQPDRAKAWTDWMRKGKFPVGGSICDNPVAETTSLGEQFGFNGTPTLRLPQRAHPKRLQPDAPTGGNHPQKPAVNPQ

SEQ ID NO: 3277 - protein, 260 aa, Neisseria; identical to SEQ ID NO: 1128

SEQ ID NO: 3278 - protein, 260 aa, Neisseria; identical to SEQ ID NO: 1128

SEQ ID NO: 3279 - protein, 206 aa, Neisseria
MRITCAPMSLLSAAVWSVRAVRTSSNRFPAALRRYSAFRPTIFPKPAGTPWHRVRRFKSNRRTRGVKPLKKPYLARGAECRCRRAWTALSHNIAERARESPRRCGKRYADIGGDSDTIRIRVFRLEHRMSIYAVAHIIHLYCATAFVGGVFFEVLVLSVLHTGRVSREARREVEKAMSYRAVRVMPFAVGLLFARGTLESTAAACP

SEQ ID NO: 3280 - protein, 277 aa, Neisseria
MRITCAPMSLLSAAVWSIRVVRTSSNRFPAAFRRYSAFQPTIFPKPADTPWHRVRRFKSNRRMRGGKPLKKPYRPRGGGCRCRRAWTALSHNIAERARESPRRCGKRYADIGGDSDTIRIRVFRLEHRMSIYAVAHIVHLYCAIAFVGGVFFEVLVLSVLHTGRVSREARREVEKAMSYRAVRVMPFVVGLLFASGIVMAANRYLSILGEPFATSFGTMLTLKILLAFSVLAHFAIAVVKMARSTLTVGWSKYIHAVVFTHMLLIVFLAKAMFYISW

SEQ ID NO: 3281 - protein, 277 aa, Neisseria
MRITCAPMSLLSAAVWSIRAVRTSSNRFPAAFRRYSAFRPTIFPKPAGTPWHRVRRFKSNRRTRGGKPLKKTYRPRRAECRCRRARTALSHNIAERARESPRRYGKRYADIGDDSDTIRIRVFRLEYRMSIYAVAHIVHLYCAIAFVGGVFFEVLVLSVLHTGRVSCEARREVEKAMSYRAVRVMPFVVGLLFASGIVMAANRYLSILGEPFATSFGTMLTLKILLAFSVLAHFAIAVVKMARSTLTVGWSKYIHTVVFTHMLLIVFLAKAMFYISW

SEQ ID NO: 3282 - protein, 294 aa, Neisseria
MLGMARHDGQQGIAAILLPRRQQFFRLVFAPINARAAAHGNRPASDAFFKLPRQRFHVFRRHQVVFGIAAHLHGCRAQFRQPRRIRLRLRQTARQRSGCGTDQAADFQITVQRFFRQPRIRQKQRHTRSPAFLHQIGPDFGFHQNAEHRAVFAQKLPYPRFFVIRKIAALRIGKQNLRGFPSRRGHLRHQQRRIGKTPPQLAYQGLGGTRFSDRNGVYPNRAGNGIRMRLAETLVPMRPVCRGTSGAFVQITPYPYRRKQPQYIIKPLEHLSISCKTNAVRTVRTAFRQRNQIS

SEQ ID NO: 3283 - protein, 294 aa, Neisseria
  VARIANT (1)...(294): Xaa = Any Amino Acid
MLGMARHDDQQRIAAILLPRRQQFFRLVFTPINARAAAHGNRPASDAFFKLPRQRFHLFRRYDVVFGIAAHLHGCRAQFRQPRRIRLCLRQTPRQRSGGRTDQAADFQITVQRFFRQPRIRQKQRHTRAPAFPHQVGPDFGFHQNAEHRAVFAQKLPYPRFFVIRKIAALRIGKQNLRGFPPRRGHLRHQQRRIGKTPPQLAYQGLGGTRFSDRNGVYPNRAGNGIRIRLAETLVPMRPICRGTSGAFVQITPYPYRRKQPQYIIKPLEHLSISCKTNAVXTVQTAFRQRNQIS

SEQ ID NO: 3284 - protein, 293 aa, Neisseria
MLGMARHDDQQGIAAILLPRRQQFFRLVFTPINARAAAHGNLPVSDAFFKLPRQRFHLFRRHQVVFGIAAHLHGCRAQFRQPRRIRLRLCQTARQRSGGRTDQAADFQITVRFFRQPRIRQKQRHTRAPAFLHQIGPDFGFHQNAEHRAVFAQKLPYPRFFVIRKIAALCIRKQNLRGFPSRRGHLRHQQRRIGKTLPQLAYQRLGGTRFPDRNGVYPNRAGNGIRIRLAETLAPMRPICRGTSGAFVQITPYPYRRKQPQYIIKPLEHLSISCKTNAVRTVRTAFRQRNQIS

SEQ ID NO: 3285 - protein, 380 aa, Neisseria
LSWGGNGVQTAYWVQEAVQPGDSLADVLARSGMARDEIARITEKYGGEADLRHLRADQSVHVLVGGDGSAREVQFFTDEDGERNLVALEKKGGIWRRSASDADMKVLPTLRSVVVKTSARGSLARAEVPVEIRESLSGIFAGRFSLDGLKEGDAVRLLYDSLYFHGQQVAAGDILAAEVVKGGTTHQAFYYRSDKEGGGGGNYYDEDGRVLQEKGGFNIEPLVYTRISSPFGYRMHPILHTWRLHTGIDYAAPQGTPVRASADGVITFKGRKGGYGNAVMIRHANGVETLYAHLSAFSQAQGNVRGGEVIGFVGSTGRSTGPHLHYEARINGQPVNPVSVALPTPELTQADKAAFAAQKQKADALLARLRGIPVTVSQSD

SEQ ID NO: 3286 - protein, 430 aa, Neisseria; identical to SEQ ID NO: 898

SEQ ID NO: 3287 - protein, 430 aa, Neisseria
MAVFPLSAKHRKYALRALAVSIILVSAAYIASTERTERVRPQRVEQKLPPLSWGGSGVQTAYWVQEAVQPGDSLADVLARSGMARDEIARITEKYGGEADLRHLRADQSVHVLVGGDGGAREVQFFTDEDGERNLVALEKKGGIWRRSASEADMKVLPTLRSVVVKTSARGSLARAEVPVEIRESLSGIFAGRFSLDGLKEGDAVRLIYDSLYFHGQQVAAGDILAAEVVKGGTRHQAFYYRSDKEGGGGGNYYDEDGRVLQEKGGFNIEPLVYTRISSPFGYRMHPILHTWRLHTGIDYAAPQGTPVRASADGVITFKGRKGGYGNAVMIRHANGVETLYAHLSAFSQAEGNVRGGEVIGFVGSTGRSTGPHLHYEARINGQPVNPVSVALPTPELTQADKAAFAAQKQKADALLARLRGIPVTVSQSD

SEQ ID NO: 3288 - protein, 327 aa, Neisseria
MKNFLSLFASILMSALIAVWFSQNPINAYWQQTYHRNSPLEPLAAYGWWRSGAALQENAYALSDGIKTFLSGETPPTAQDGGSADMPPEAAASEAAPPAGGTEWKQGTEAAAVRSGDKVFFAGDSLMQGVAPFVQKSLKQQYGIESANLSKQSTGLSYPSFFDWPKTIEETLKKHPEISVLAVFLGPNDPWDFPVGKRYLKFASDEWAQEYLKRVDRILEAAHTHRVQVVWLGIPYMKKVKLDGQMRYLDKLLSEHLKGKIILIPTAQTLSGGKGRYTDSVNVNGKPVRYRSKDGIHFTAEGQKLLAEKIMEKIVFEPSTQPSSTQP

SEQ ID NO: 3289 - protein, 327 aa, Neisseria
MKNFLSLFSSILMSALIAVWFSQNPINAYWQQTYHRNSPLEPLAAYGWWRSGAALQENAYALSDGIKAFLSGETPPTAQDGGSADMPSEAAASEAVPQTGETEWKQDTEAAAVRSGDKVFFVGDSLMQGVAPFVQKSLKQQYGIESVNLSKQSTGLSYPSFFDWPKTIEETLQKHPEISVLAVFLGPNDPWDFPVGKLYLKFASDEWAQEYLKRVDRILEAAHTHRVQVVWLGIPYMKKAKLDGQMRYLDKLLSEHLKGKIILIPTTHTLSGGKDRYTDSVNVNGKPVRYRSKDGIHFTAEGQKLLAAKIMEKIVFEPSTQPSSTQP

SEQ ID NO: 3290 - protein, 327 aa, Neisseria
MKNFLSLFASILMSALIAVWFSQNPINAYWQQTYHRNSPLEPLAAYGWWRSGAALQENAYALSDGIKAFLSGETPPTAQDGGSADMPSEAAAPETAPQTGETEWKQNTEAAAVRTGDKVFFAGDSLMQGVAPFVQKSLKQQYGIESVNLSKQSTGLSYPSFFDWPKTIEETLKKHPEISVLAVFLGPNDPWDFPVGKRYLKFASDEWAQEYLKRVDRILEAAHTHYVQVVWLGIPYMKKAKLDGQMRYLDKLLSEYLKGKIILIPTAHTLSGGKDRYTDSVNVNGKPVRYRSKDGIHFTAEGQKLLAAKIMEKIVFEPSTQPSSTQP

SEQ ID NO: 3291 - protein, 397 aa, Neisseria
MNPKHFIAFSALFAATQAEALPVASVSPDTVTVSPSAPYTDTNGLLTDYGNAAASPWMKKLRSVAQGSGEAFRILQIGDSHTAGDFFTDALRKRLQKTWGDGGIGWVYPANVKGQRMAAVRHSGNWQSFTSRNNTGDFPLGGILAQTGSGGGMTLTASDGKTGKQRVSLFAKPLLAEQTLTVNGNTVSANGGGWQVLDTGAALPLAIQTEMPWDIGFINIENPAGGITVSAMGINGAQLTQWSKWRADRMNDLAQTGADLVILSYGTNEAFNNNIDIADTEQKWLDTVRQIRDSLPAAGILIIGAPESLKNTLGVCGTRPVLLTEVQQMQRRVARQGQTMFWSWQNAMGGICSMKNWLNQGWAAKDGVHFSAQGYRRAAEMLADSLEELVRAAAIRQ

SEQ ID NO: 3292 - protein, 397 aa, Neisseria
MNPKHLIAFSALFAATQAEALPVASVSLDTVTVSPSAPYTDTNGLLTDYGNASASPWMKKLQSVAQGSGETFRILQIGDSHTAGDFFTDSLRKRLQKTWGDGGIGWVYPANVKGQRMAAVRHNGNWQSLTSRNNTGDFPLGGILAHTGSGGSMTLTASDGIASKQRVSLFAKPLLAEQTLTVNGNTVSANGGGWQVLDTGAALPLTIHTEMPWDIGFINIENPAGGITVSAMGINGAQLTQWSKWRADRMNDLAQTGADLVILSYGTNEAFNNNIDIADTEQKWLDTVRQIRDSLPAAGILIIGAPESLKNTLGVCGTRPVRLTEVQQMQRRVARQGQTMFWSWQNAMGGICSMKNWLNQGWAAKDGVHFSAKGYRRAAEMLADSLEELVRSAAIRQ

SEQ ID NO: 3293 - protein, 397 aa, Neisseria
MNPKHLIAFSALFAATQAEALPVASVSLDTVTVSPSAPYTDTNGLLTDYGNASASPWMKKLQSVAQGSGETFRILQIGDSHTAGDFFTDSLRKRLQKTWGDGGIGWVYPANVKGQRMAAVRHNGNWQSLTSRNNTGDFPLGGILAHTGSGGSMTLTASDGIASKQRVSLFAKPLLAEQTLTVNGNTVSANGGGWQVLDTGAALPLTIHTEMPWDIGFINIENPAGGITVSAMGINGAQLTQWSKWRADRMNDLAQTGADLVILAYGTNEAFGDNIDIADTEQKWLDTVRQIRDSLPAAGILIIGAPESLKNTLGVCGTRPVRLTEVQQMQRRIARQGQTMFWSWQNAMGGVCSMKNWLNHGWAAKDGVHFSAKGYQRSAEMLADSLEELVRSAAIRQ

SEQ ID NO: 3294 - protein, 533 aa, Neisseria
MHSIYFFKEKQMSQTDARRSGRFLRTVEWLGNMLPHPVTLFIIFIVLLLIASAVGAYFGLSVPDPRPVGAKGRADDGLIHVVSLLDADGLIKILTHTVKNFTGFAPLGTVLVSLLGVGIAEKSGLISALMRLLLTKSPRKLTTFMVVFTGILSNTASELGYVVLIPLSAVIFHSLGRHPLAGLAAAFAGVSGGYSANLFLGTIDPLLAGITQQAAQIIHPDYVVGPEANWFFMAASTFVIALIGYFVTEKIVEPQLGPYQSDLSQEEKDIRHSNEITPLEYKGLIWAGVVFVALSALLAWSIVPADGILRHPETGLVAGSPFLKSIVVFIFLLFALPGIVYGRITRSLRGEREVVNAMAESMSTLGLYLVIIFFAAQFVAFFNWTNIGQYIAVKGAVFLKEVGLGGSVLFIGFILICAFINLMIGSASAQWAVTAPIFVPMLMLAGYAPQVIQAAYRIGDSVTNIITPMMSYFGLIMATVIKYKKDAGVGTLISMMLPYSAFFLIAWIALFCIWVFVLGLPVGPGTPTFYPVP

SEQ ID NO: 3295 - protein, 526 aa, Neisseria
  VARIANT (1)...(526): Xaa = Any Amino Acid
MHSIYFFKEKQMSQTDTQRDGRFLRTVEWLGNMLPHPVTLFIIFIVLLLIASAVGAYFGLSVPDPRPVGAKGRADDGLIYIVSLLNADGFIKILTHTVKNFTGFAPLGTVLVSLLGVGIAEKSGLISALMRLLLTKSPRKLTTFMVVFTGILSNTASELGYVVLIPLSAIIFHSLGRHPLAGLAAAFAGVSGGYSANLFLSTIDPLLACITHQAAVVGPEANWFFMVASTFVIALIGYFVTEKIVEPQLGPYQSDLSQEEKDIRHSNEITPLEYKGLIWAGVVFVALSALLAWSIVPADGILRHPETGLVSGSPFLKSIVVFIFLLFALXGXVYGRVTRSLRGEQEVVNAMAESMSTLXLXLXXIFFAAQFVAFFNWTNIGQYIAVKGATFLKEVGLGGSVLFIGFILICAFINLMIGSASAQWAVTAPIFVPMLMLAGYAPEVIQAAYRIGDSVTNIITPMMSYFGLIMATVIKYKKDAGVGTLISMMLPYSAFFLIAWIALFCIWVFVLGLPVGPGAPTFYPAP

SEQ ID NO: 3296 - protein, 533 aa, Neisseria
MHSIYFFKEKQMSQTDTQRDGRFLRTVEWLGNMLPHPVTLFIIFIVLLLIASAAGAYFGLSVPDPRPVGAKGRADDGLIHVVSLLDADGLIKILTHTVKNFTGFAPLGTVLVSLLGVGIAEKSGLISALMRLLLTKSPRKLTTFMVVFTGILSNTASELGYVVLIPLSAIIFHSLGRHPLAGLAAAFAGVSGGYSANLFLGTIDPLLAGITQQAAQIIHPDYVVGPEANWFFMVASTFVIALIGYFVTEKIVEPQLGPYQSDLSQEEKDIRHSNEITPLEYKGLIWAGVVFVALSALLAWSIVPADGILRHPETGLVSGSPFLKSIVVFIFLLFALPGIVYGRVTRSLRGEQEVVNAMAESMSTLGLYLVIIFFAAQFVAFFNWTNIGQYIAVKGATFLKEVGLGGSVLFIGFILICAFINLMIGSASAQWAVTAPIFVPMLMLAGYAPEVIQAAYRIGDSVTNIITPMMSYFGLIMATVIKYKKDAGVGTLISMMLPYSAFFLIAWIALFCIWVFVLGLPVGPGAPTFYPAP

SEQ ID NO: 3297 - protein, 273 aa, Neisseria
MDFLIVLKALMMGLVEGFTEFLPISSTGHLIVFGNLIGFHSNHKVFEIAIQLGAVLAVVFEYRQRFSNVLHGVGKDRKANRFVLNLAIAFIPAAVMGLLFDKQIKEYLFNPLSVAVMLVLGGFFILWVEKRQSRAEPKIADVDALRPIDALMIGVAQVFALVPGTSRSGSTVMGGMLWGIERKTATEFSFFLAVPMMVAATAYDVLKHYRFFTLHDVGLILIGFIAAFVSGLVAVKALLKFVSKKNYIPFAYYRIVFGIVIIILWLSGWISWE

SEQ ID NO: 3298 - protein, 244 aa, Neisseria
  VARIANT (1)...(244): Xaa = Any Amino Acid
MDFLIVLKALMMGLVEGFTEFLPISSTGHLIVFGNLIGFHSNHKVFEIAIQLGAVLAVVFEYRQRFSNVLHGLGKDRKANRFVLNLAIAFIPAAVMGLLFGXQIKEXLFNPLSVAVMLVLXGFXILWVEKRQSRAEPKIADVDALRPIDALMIGVAQVFALVPGTSRSGSTIMGGMLWGIERKTATEFSFFLAVPMMVAATAYDVLKHYRFFTLHDVGLILIGFIAAFVSGLVAVKALLRFVSG

SEQ ID NO: 3299 - protein, 273 aa, Neisseria
MDFLIVLKALMMGLVEGFTEFLPISSTGHLIVFGNLIDFHSNHKVFEITIQLGAVLAVVFEYRQRFSNVLHGVGKDRKANRFVLNLAIAFIPAAVMGLLFGKQIKEYLFNPLSVAVMLVLGGFFILWVEKRQSRAEPKIVDVDALRPIDALMIGVAQVFALVPGTSRSGSTIMGGMLWGIERKTATEFSFFLAVPMMVAATAYDVLKHYRFFTLHDVGLILIGFVAAFVSGLVAVKALLRFVSKKNYIPFAYYRIVFGIAIIILWLSGWISWE

SEQ ID NO: 3300 - protein, 267 aa, Neisseria; identical to SEQ ID NO: 194

SEQ ID NO: 3301 - protein, 252 aa, Neisseria
  VARIANT (1)...(252): Xaa = Any Amino Acid
GLFFGLILATVIIAGILFYLNQSGQNAFKIPASSKQPAETEILKPXNQXKEDIQPXPADQNALSEPDAATEAEQSDAEXAADKQPVADKADEVEEKAGEPEREEPDGQAVRKKALTEEREQTVREKAQKKDAETVKXQAVKPSKETEKKASKEEKKAAKEKVAPKPTPEQILNSGSIEKARSAAAKEVQKMKTPTRRKQRIICKWARMPTVRARKGSVPNWQSWAYLPRWSVIRRDIKRFTGCKAAICLPMR

SEQ ID NO: 3302 - protein, 266 aa, Neisseria
MFMNKFSQSGKGLSGFFFGLILATVIIAGILFYLNQSGQNAFKIPVPSKQPAETEILKPKNQPKEDIQPEPADQNALSEPDAAKEAEQSDAEKAADKQPVADKADEVEEKADEPEREKSDGQAVRKKALTEEREQTVGEKAQKKDAETVKKQAVKPSKETEKKASKEEKKAEKEKVAPKPTPEQILNSGSIEKARSAAAKEVQKMKTPTRRKQRIICKWARMPTAGARKGSVPNWQSWAYLPRWSVIRRDIKRFTGCKAAICLPMR

SEQ ID NO: 3303 - protein, 288 aa, Neisseria; identical to SEQ ID NO: 112

SEQ ID NO: 3304 - protein, 287 aa, Neisseria
  VARIANT (1)...(287): Xaa = Any Amino Acid
MKTFFKTLSAAALALILAACGGQKDSAPAASASAAADNGAAKKXIVFGTTVGDFGDMVKEQIQPELEKKGYTVKLVEFTDYVRPNLALAEGEXDINVFQHKPYLDDFKKEHNLDITEVFQVPTAPLGLYPGKLKSLEEVKDGSTVSAPNDPSNFARVLVMLDELGWIKLKXGINPLTASKADIAENLKNIKIVELEAAQLPRSRADVDFXVVNGXYAISSGMKLTEALFQEPSFAYVNWSAVKTADKDSQWLKDVTEAYNSDAFKAYAHKRFEGYKSPAAWNEGAAK

SEQ ID NO: 3305 - protein, 232 aa, Neisseria
MLNRVFYRILGVADNLYPCLSDFCFFTIIAGLPLQAVLWERRMMVRRLIIGISGASGFQYGVKALELLRAQDVETHLVVSKGAEMARASETDYTKDEVYALADFVHPIGNIGACIASGTFKTDGMLVAPCSMRTLASVAHGFGDNLLTRAADVVLKERRRLVLMVRETPLNLAHLDNMKRVTEMGGVVFPPVPAMYRKPQTADDIVAHSIAHTLSLFGIDTPDLAEWQGMAD

SEQ ID NO: 3306 - protein, 231 aa, Neisseria
  VARIANT (1)...(231): Xaa = Any Amino Acid
MLNRVFYRILGVADNLYPRLSDFCFFTIIAGLPLQAVLWERRMMVRRLIIGISGASGFQYGVKALELLRAQDVETHLVVSKGAEMARASETAYARDEVYALADFVHPIGNIGACIASGTFKTDGMLVAPCSMRTLASVAHGFGDNLLTRAADVVLKERRRLVLMVRETPLNLAHLDNMKRXTEMGGVVFPPVPAMYRKPQTADDIVAHSVAHALSLFGIDTPDSAEWQGMA

SEQ ID NO: 3307 - protein, 232 aa, Neisseria
  VARIANT (1)...(232): Xaa = Any Amino Acid
MLNRIFYRILGVADNLYPYLSDFCFFTIIAGLPLQAVLWERRMMVRRLIIGISGASGFQYGVKALXLLRAQDIETHLVVSKGAEMARASETXYARDXVYALADXVHPIGNIGACIASGTFKTDGMLVAPCSMRTLASVVHGFGDNLLTRAADVVLKERRRLVLMVRETPLNLAHLDNMXRVTEMGGVVFPPVPAMYRKPQTADDIVAHSVAHALSLFGIDTPDSAEWQGMAD

SEQ ID NO: 3308 - protein, 232 aa, Neisseria; identical to SEQ ID NO: 3305

SEQ ID NO: 3309 - protein, 232 aa, Neisseria
MLNRVFYRILGVADNLYPRLSDFCFFTIIAGLPLQAVLWERRMMVRRLIIGISGASGFQYGVKALELLRAQDVETHLVVSKGAEMARASETAYARDEVYALADFVHPIGNIGACIASGTFKTDGMLVAPCSMRTLASVAHGFGDNLLTRAADVVLKERRRLVLMVRETPLNLAHLDNMKRVTEMGGVVFPPVPAMYRKPQTADDIVAHSVAHALSLFGIDTPDSAEWQGMAD

SEQ ID NO: 3310 - protein, 232 aa, Neisseria; identical to SEQ ID NO: 3307
  VARIANT (1)...(232): Xaa = Any Amino Acid

SEQ ID NO: 3311 - protein, 455 aa, Neisseria; identical to SEQ ID NO: 119

SEQ ID NO: 3312 - protein, 389 aa, Neisseria
  VARIANT (1)...(389): Xaa = Any Amino Acid
MFSFGWVFDRPQYELGSLSPVAAVACRRALSRLGLDVQIKWPNDLVVGRDKLGGILIETVRTGGKTVAVVGIGINFVLPXEVENAASVQSLFQTASRRGNADAAVLLXXXXXXXXEISLRSDXRPVSVXKRRDSERFLLLDGGNSRLKWAWVENGTFATVGSAPYRDLSPLGAEWAEKADGNVRIVGCAVCGEFKKAQVQEQLARKIEWLPSSAQALFGIRNHYRHPEEHGSDRWFNALGSRRFSRNACVVVSCGTAVTVDALTDDGHYLGGTIMPGFHLMKESLAVRTANLNRHAGKRYPFPTTTGNAVASGMMDAVCGSVMMMHGRLKEKTGAGKPVDVIITGGGAAKVAEALPPAFLAENTVRVADNLVIYGLLNMIAAEGREYEH

SEQ ID NO: 3313 - protein, 455 aa, Neisseria
MFSFGWVFDRPQYELGSLSPVAAVACRRALSRLGLKTQIKWPNDLVVGRDKLGGILIETVRTGGKTVAVVGIGINFVLPKEVENAASVQSLFQTASRRGNADAAVLLETLLAELDAVLLQYARDGFAPFVAEYQAANRDHGKAVLLLRDGETVFEGTVKGVDGQGVLHLETAEGKQTVVSGEISLRSDDRPVSVPKRRDSERFLLLDGGNSRLKWAWVENGTFATVGSAPYRDLSPLGAEWAEKVDGNVRIVGCAVCGEFKKAQVQEQLARKIEWLPSSAQALGIRNHYRHPEEHGSDRWFNALGSRRFSRNACVVVSCGTAVTVDALTDDGHYLGGTIMPGFHLMKESLAVRTANLNRHAGKRYPFPTTTGNAVASGMMDAVCGSVMMMHGRLKEKTGAGKPVDVIITGGGAAKVAEALPPAFLAENTVRVADNLVIHGLLNLIAAEGGESEHT

SEQ ID NO: 3314 - protein, 592 aa, Neisseria; identical to SEQ ID NO: 120

SEQ ID NO: 3315 - protein, 592 aa, Neisseria; identical to SEQ ID NO: 117

SEQ ID NO: 3316 - protein, 592 aa, Neisseria; identical to SEQ ID NO: 118

SEQ ID NO: 3317 - protein, 451 aa, Neisseria
MSIQSGEILETVKMVADRNFDVRTITIGIDLHDCISTDIDVLNQNIYNKITTVGKDLVATAKHLSAKYGVPIVNQRISVTPIAQIAAATKADSYVSVAQTLDKAAKAIGVSFIGGFSALVQKGMSPSDEVLIRSVPEAMKTTDIVCSSINIGSTRAGINMDAVKLAGETIKRTAEITPEGFGCAKIVVFCNAVEDNPFMAGAFHGSGEADAVINVGVSGPGVVKAALENSDAVSLTEVAEVVKKTAFKITRVGELIGREASKMLNIPFGILDLSLAPTPAVGDSVARILEEMGLSVCGTHGTTAALALLNDAVKKGGMMASSAVGGLSGAFIPVSEDEGMIAAAEAGVLTLDKLEAMTAVCSVGLDMIAVPGDTPAHTISGIIADEAAIGMINSKTTAVRIIPVTGKTVGDSVEFGGLLGYAPVMPAKEGSCEVFVNRGGRIPAPVQSMKN

SEQ ID NO: 3318 - protein, 447 aa, Neisseria
  VARIANT (1)...(447): Xaa = Any Amino Acid
MSIQSGEILETVKMVADQNFDVRTITIGIDLHDCISSDINVLNQNIYNKITTVGKDLVTTAKYLSAKYGVPIVNQRISVTPIAQIAAATHADSYVSVAQTLDKAAKAIGVSFIGGFSALVQKGMSPSDEVLIRSIPEAMKTTDIVCXSINIGSTRAGINMDAVKLAGETVKRTAEITPEGFGCAKIVVFCNAVEDNPFXAGAFHGSGDAVINVGVSGPGVVKAALENSDATTLTEVAEVVKKTAFKITRVGELIGREASKMLNIPFGILDLSPTPPVGDSVARILEEMGLSVCGTHGTTAALALLNDAVKKGGMMASSAVGGLSGAFIPVSEDEGMIXAAEAGVLTLDKLEAMTAVCSVGLDMIAVPGDTPAHTISGIIADEAAIGMINSKTTAVRIIPVTGKTVGDTVEFGGLLGYAPVMPVKEGSCEVFVNRGGRIPAPVQSMKN

SEQ ID NO: 3319 - protein, 451 aa, Neisseria
MSIQSGEILETVKMVADQNFDVRTITIGIDLHDCISTDIDVLNQNIYNKITTVGKDLVATAKYLSAKYGVPIVNQRISVTPIAQIAAATHADSYVSVAQTLDKAAKAIGVSFIGGFSALVQKGMSPSDEVLIRSIPEAMKTTDIVCSSINIGSTRAGINMDAVRLAGETIKRTAEITLEGFGCAKIVVFCNAVEDNPFMAGAFHGSGEADAVINVGVSGPGVVKAALENSDATTLTEVAEVVKKTAFKITRVGELIGREASKMLNIPFGILDLSLAPTPAVGDSVARILEEMGLSVCGTHGTTAALALLNDAVKKGGMMASSAVGGLSGAFIPVSEDEGMIAAAEAGVLTLDKLEAMTAVCSVGLDMIAVPGDTPAHTISGIIADEAAIGMINSKTTAVRIIPVTGKTVGDSVEFGGLLGYAPVMPVKEGSCEVFVNRGGRIPAPVQSMKN

SEQ ID NO: 3320 - protein, 173 aa, Neisseria
MDDPRTYGSGNPGATNVLRSGKKKAAALTLLGDAAKGLVAVLLARVLQEPLGLSDSAIAAVALAALVGHMWPVFFGFKGGKGVATALGVLLALSPATALVCALIWLVMAFGFKVSSLAALVATTAAPLAALFFMPHTSWIFATLAIAILVLLRHKSNILNLIKGKESKIGEKR

SEQ ID NO: 3321 - protein, 173 aa, Neisseria
MDDPRTYGSGNPGATNVLRSGKKKAAALTLLGDAAKGLVAVLLARVLQEPLGLSDSAIAAVALAALVGHMWPVFFGFKGGKGVATALGVLLALSPATALVCALIWLVMAFGFKVSSLAALTATIAAPVAASFFMPHVSWVWATVAIALLVLFRHKSNIVKLLEGRESKIGGSR

SEQ ID NO: 3322 - protein, 173 aa, Neisseria
MDDPRTYGSGNPGATNVLRSGKKKAAALTLLGDAAKGLVAVLLARVLQEPLGLSDSAIAAVALAALVGHMWPVFFGFKGGKGVATALGVLLALSPTTALVCALIWLVMAFGFKVSSLAALTATIAAPLAALFFMPHTSWIFATLAIAILVLLRHKSNILNLIKGKESKIGEKR

SEQ ID NO: 3323 - protein, 203 aa, Neisseria; identical to SEQ ID NO: 2253

SEQ ID NO: 3324 - protein, 203 aa, Neisseria; identical to SEQ ID NO: 2253

SEQ ID NO: 3325 - protein, 203 aa, Neisseria
MKLQQLAEEKIGVLIVFTLLVVSVGLLIEVVPLAFTKAATQPASGVKPYNALQVAGRDIYIREGCYNCHSQMIRPFRAETERYGHYSVAGESVYDHPFQWGSKRTGPDLARVGGRYSDEWHRIHLLNPRDVVPESNMPAFPWLARNKVDVDATVANMKALRKVGTPYSDEEIAKAPEALANKSELDAVVAYLQGLGLALKNVR

SEQ ID NO: 3326 - protein, 497 aa, Neisseria
MDMVNTKPNTSVINMLSFLTGLLSLGIEVLWVRMFSFAAQSVPQAFSFILACFLTGIAVGAYFGKRICRSRFVDIPFIGQCFLWAGIADFLILGAAWLLTGFSGFVHHAGIFITLSAVVRGLIFPLVHHVGTDGNKSGRQVSNVYFANVAGSALGPVLIGFVILDLLSTQQIYLLICLISAAVPLFCTLFQKSLRLNAVSVAVSLMFGILMFLLPDSVFQNIAGRPDRLIENKHGIVAVYHRDGDKVVYGANVYDGAYNTDIFNSVNGIERAYLLPSLKSGIRRIFVVGLSTGSWARVLSAIPEMQSMIVAEINPAYRSLIADEPQIAPLLQDKRVEIVLDDGRKWLRRHPDEKFDLILMNSTWYWRAYSTNLLSAEFLKQVQSHLTPDGIVMFNTTHSPHAFATAVHSIPYAYRYGHMVVGSATPVVFPNKELLKQRLSRLIWPESGRHVFDSSTVDAAAQKVVSRMLIRMTEPSAGAEVITDDNMIVEYKYGRGI

SEQ ID NO: 3327 - protein, 497 aa, Neisseria
  VARIANT (1)...(497): Xaa = Any Amino Acid
MDIVNTKPNTSLIYMXSFLSGLLSLGIEVLWVRMFSFAAQSVPQAFSFTLACFLTGIAVGAYFGKRICRSRFVDIPFIGQCFLWAGIADFLILGAAWLLTGFSGFVHHAGIFITLSAVVXXLIFPLVHHVGTDGNKSGRQVSNVYFAXVAGSALGPVLIGFVILDFLSTQQIYLLICXISAAVPLFCTLFQKSLRLNAVSVAVSLMFGILMFLLPDSVFQNIADRPDRLIENKHGIVAVYHRDGDKVVYGANVYDGAYNTDVFNSVNGIERAYLLPSLKSGIRRIFVVGLSTGSWARVLSAIPEMQSMIVAEINPAYRSLIADEPQIAPLLQDKRVEIVLDDGRKWLRRHPDEKFDLILMNTTWYWRAYSTNLLSAEFLKQVQSHLTPDGIVMFNTTHSPHAFATAVHSIPYAYRYGHMVVGSATPVVFPNKELLKQRLSRLIWPESGRHVFDSSTVDAAAQKVVSRMLIQMTEPSAGAEVITDDNMIVEYKYGRGI

SEQ ID NO: 3328 - protein, 497 aa, Neisseria
MDIVNTKPNTSLIYMLSFLSGLLSLGIEVLWVRMFSFAAQSVPQAFSFTLACFLTGIAVGAYFGKRICRSRFVDIPFIGQCFLWAGIADFLILGAAWLLTGFSGFVHHAGIFITLSAVVRGLIFPLVHHVGTDGNKSGRQVSNVYFANVAGSALGPVLIGFVILDFLSTQQIYLLICLISAAVPLFCTLFQKSLRLNAVSVAVSLMFGILMFLLPDSVFQNIADRPDRLIENKHGIVAVYHRDGDKVVYGANVYDGAYNTDVFNSVNGIERAYLLPSLKSGIRRIFVVGLSTGSWARVLSAIPEMQSMIVAEINPAYRSLIADEPQIAPLLQDKRVEIVLDDGRKWLRRHPDEKFDLILMNTTWYWRAYSTNLLSAEFLKQVQSHLTPDGIVMFNTTHSPHAFATAVHSIPYAYRYGHMVVGSATPVVFPNKELLKQRLSRLIWPESGRHVFDSSTVDAAAQKVVSRMLIQMTEPSAGAEVITDDNMIVEYKYGRGI

SEQ ID NO: 3329 - protein, 320 aa, Neisseria; identical to SEQ ID NO: 42

SEQ ID NO: 3330 - protein, 320 aa, Neisseria; identical to SEQ ID NO: 40

SEQ ID NO: 3331 - protein, 320 aa, Neisseria; identical to SEQ ID NO: 41

SEQ ID NO: 3332 - protein, 558 aa, Neisseria
MVGRTLTADTDIFVLLAAGGDGKMQHHFDGRVAFVKRFGHQAAVSVEAEGQLGHVVRADGEAVEVLQELFRQYRVARQLAHHNQAQAVFAAFQAVFFQCLNHCFGFAQSADERNHDFDVGQTHFVTNAFQGFAFQGETVFEALGNITRRTTEAQHRVFFMRFVYAAADQVGVFVGFEVGHTDDGFTRINRCGKRCHAFGDFIDVEVDRGCVTGDAADNFRFQFVVLFVKFQQGFRVDADLAVDDKFHTRQADAFAGQIGEAECEFGIADVHHDFDGCFWHIVQGDIGNLYVQQAGIDKAGIAFGTGYGNFLTVFQEFGRIAAADDGRNTQFARDDGGVAGASAAVGHDGGSTFHHGFPIRIGHVGNQYVAGFDGIHLGSIFNQAHLALTDFLTDGTTFAQDGFFAVDGVAAQVAAAFFLGFDGFGAGLQDVEFAVQAVASPFDIHRAAVVFFDGQRVVCQLGDFFVGNGEAVAVFFGDFDVGYRFAGFGFVGENHFDVFRTHGLAQDGGFACFERGFEHIKFVRVDRALYDVFAQTVRGGNKDDLVVAGFGVEGEHHT

SEQ ID NO: 3333 - protein, 558 aa, Neisseria
  VARIANT (1)...(558): Xaa = Any Amino Acid
MVGXALTADADIFVLLAAGGDGKVQHHFDGRVAFVKRFGYQAAVAVETEGQLGHVVRADGEAVEVLQELFRQYRVARQLAHHNQAQAVFAAFQAVFFQGFDNGFGFAQSADERNHDFNVGQPHFIADAFQGFAFQGETVFEVVGDITRRTTEAQHRVFFMRFVYVAADQVGVFVGFEVGHTDDGFTRINRCGQCRHAFGDFIDVEVDRGRVTGDTAGNFRFXFVVLFVKFQQXFGVDTDLAVDDKFHTRQADAFAGQVGEAECEFGIADVHHDFYRCFRHIVXGDIGNLYVQQTGIDKAGIAFGTGYGNFLTVFQQFGCIAAADNGRNAQFTRDDGGVAGTAAAVGNDGRSTFHHGFPIRIGHVGNEYVAGFDGIHLGSIFNQAHLALTDFLTDGAAFAXYGFVAVDGEAAQVAVALFLGFYGFGTGLQDVEFAVQAVASPFDIHRAAVVFFDGQCVMRQLSNFFVGNGEAVAVFLGDIDVGYGFTGFCFVGKNHFDVFXTHGFTQDGGLARFERGFEHXKFVRVDRTLYDVFAQTVRGGNKDDLIVXGFGVEGEHHT

SEQ ID NO: 3334 - protein, 554 aa, Neisseria
MVGRALTADADIFVLLAAGGDGKVQHHFDGRVAFVKRFGYQAAVAVETEGQLGHVVRADGEAVEVLQELFRQYRVARQLAHHNQAQAVFAAFQAVFFQGFDNGFGFAQSADERNHDFNVGQPHFIADAFQGFAFQGETVFEVVGDITRRTTEAQHRVFFMRFVYVAADQVGVFVGFEVGHTDDGFTRINRCGQCRHAFGDFIDVEVDRGRVTGDTAGNFRFFVVLFVKFQQGFGVDTDLAVDDKFHTRQADAFAGQVGEAECEFGIADVHHDFYRCFRHVVQSNIGNLYVQQAGVDEAGIAFGTGYGNFLTVFQQFGCIAAADNGRNTQFARDDGGVAGTSAPVGHDGGSAFHHRFPIWVGHVGNQYVAGFDGIHLGSIFNQAYLALTDFLTDGAAFAQDGFFAVDRKAAQVAAAFFLGFDGFGTGLQDVEFAVQAVASPFDVHRAAVVFFDGQCVMRQLGDFFVGNGEAVAVFFGDIDVGYRFAGFCFVGKNHFDVFAHGFAQDGRFACFQRGFEHIEFVGIDCALYDVFAQTVGSDKDDLVVTGFGIEGEHH

SEQ ID NO: 3335 - protein, 168 aa, Neisseria
MMKPHNLFQFLAVCSLTVAVASAQAGAVDALKQFNNDADGISGSFTQTVQSKKKTQTAHGTFKILRPGLFKWEYTLPYRQTIVGDGQTVWLYDVDLAQVTKSSQDQAIGGSPAAILSNKTALESSYTLKEDGSSNGIDYVRGNAQTQQRRLPIHPHRLQRRQPRRHAA

SEQ ID NO: 3336 - protein, 168 aa, Neisseria
  VARIANT (1)...(168): Xaa = Any Amino Acid
MMKPHNLFQFLAVCSLTVAVASAQAGAVDALKQFNNDADGISGSFTQXVQXKKKTQTAHGTFKILRPGLFKWEYTKLYRQTIVGDGQTVWLYDVDLAQVTKSSQDQAIGXSPAAILSNKXALESSYTLKEDGSSNGIDYVGNAQTQQRRLPIHPHRLQRRQPRRHAAX

SEQ ID NO: 3337 - protein, 167 aa, Neisseria
MMKPHNLFQFLAVCSLTVSVASAQAGAVDALKQFNNDADGISGSFTQTVQSKKKTQTAHGTFKILRPGLFKWEYTSPYKQTIVGDGQTVWLYDVDLAQVTKSSQDQAIGGSPAAILSNKTALESSYTLKEDGSSNGIDYVGNAQTQQRRLPIHPHRLQRRQPRRHAA

SEQ ID NO: 3338 - protein, 207 aa, Neisseria
MMKPHNLFQFLAVCSLTVAVASAQAGAVDALKQFNNDADGISGSFTQTVQSKKKTQTAHGTFKILRPGLFKWEYTLPYRQTIVGDGQTVWLYDVDLAQVTKSSQDQAIGGSPAAILSNKTALESSYTLKEDGSSNGIDYVRATPKRNNAGYQYIRIGFKGGNLAAMQLKDSFGNQTSISFGGLNTNPQLSRGAFKFTPPKGVDVLSN

SEQ ID NO: 3339 - protein, 207 aa, Neisseria; identical to SEQ ID NO: 1199

SEQ ID NO: 3340 - protein, 207 aa, Neisseria
MMKPHNLFQFLAVCSLTVSVASAQAGAVDALKQFNNDADGISGSFTQTVQSKKKTQTAHGTFKILRPGLFKWEYTSPYKQTIVGDGQTVWLYDVDLAQVTKSSQDQAIGGSPAAILSNKTALESSYTLKEDGSSNGIDYVLATPKRNNAGYQYIRIGFKGGNLAAMQLKDSFGNQTSISFGGLNTNPQLSRGAFKFTPPKGVDVLSN

SEQ ID NO: 3341 - protein, 68 aa, Neisseria
MSAPSASVIILFHAASISASSCSGKGVSKIHWRISLPTRASSETSSTSNFARAAEMRSFRPLCARNAR

SEQ ID NO: 3342 - protein, 68 aa, Neisseria
MSAPPASATILFHAASISASSCSGKGVSKIHWRISLPTRASSATSSTSNFASAAEMRSLRPLCARNAR

SEQ ID NO: 3343 - protein, 207 aa, Neisseria
ATGTCCGCGCCGCCGGCATCGGCAACCATTTTGTTCCATGCCGCTTCGATTTCGGCATCGAGCTGTTCGGGGAAGGGCGTGTCCAAAATCCATTGGCGGATTTCTTTGCCGACGCGTGCCAGTTCGGCAACGTCTTCGACATCTAATTTTGCCAGTGCGGCGGAAATGCGTTCGCTCAGACCGTTGTGTGCGAGGAATGCGCGGTAG

SEQ ID NO: 3344 - protein, 119 aa, Neisseria
MARSLYREAKTWRIAFLTLSKPLIFRKVSCWPANDASGRSSAVAEERTATEMSAPSASVIILFHAASISASSCSGKGVSKIHWRISLPTRASSETSSTSNFARAAEMRSFRPLCARNAR

SEQ ID NO: 3345 - protein, 119 aa, Neisseria
MARSLYREANTWCIASLTLSKPLMFKKVSCCPANDASGRSSAVAEERTATEMSAPPASATILFHAASISASSCSGKGVSKIHWRISLPTRASSATSSTSNFASAAEMRSLRPLCARNAR

SEQ ID NO: 3346 - protein, 119 aa, Neisseria
MARSLYREANTWRIASLTFSKPLIFRKVSCWPANDASGRSSAVAEERTATEMSAPPASATILFHAASISASSCSGKGVSKIHWRISLPTRASSATSSTSNFASAAEMRSLRPLCARNAR

SEQ ID NO: 3347 - protein, 424 aa, Neisseria
MLVQDLPFEVKLKKFHIDFYNTGMPRDFASDIEVTDKATGEKLERTIRVNHPLTLHGITIYQASFADGGSDLTFKAWNLRDASREPVVLKATSIHQFPLEIGKHKYRLEFDQFTSMNVEDMSEGAEREKSLKSTLNDVRAVTQEGKKYTNIGPSIVYRIRDAAGQAVEYKNYMLPILQDKDYFWLTGTRSGLQQQYRWLRIPLDKQLKADTFMALREFLKDGEGRKRLVADATKDAPAEIREQFMLAAENTLNIFAQKGYLGLDEFITSNIPKGQQDKMQGYFYEMLYGVMNAALDETIRRYGLPEWQQDEARNRFLLHSMDAYTGLTEYPAPMLLQLDGFSEVRSSGLQMTRSPGALLVYLGSVLLVLGTVFMFYVPKKRAWVLFSNKIRFAMSSARSERDLQKEFPKHVESLQRLGKDLNHD

SEQ ID NO: 3348 - protein, 425 aa, Neisseria
  VARIANT (1)...(425): Xaa = Any Amino Acid
ILVQDLPFEVKLKKFHIDFYNTGMPRDFASDIEVTDKATGEKLERTIRVNHPLTLHGITIYQASFADGGSDLTFKAWNLGDASREPVVLKATSIHQFPLEIGKHKYRLEFDQFTSMNVEDMSEGAEREKSLKSTLXDVRAVTQEGKKYTNIGPSIVYRIRDAAGQAVEYKNYMLPVLQEQDYFWITGTRSGLQQQYRWLRIPLDKQLKADTFMALREFLKDGEGRKRLVADATKGAPAEIREQFMLAAENTLNIFAQKGYLGLDEFITSNIPKEQQDKMQGYFYEMLYGVMNAALDETIRRYGLPEWQQDEARNRFLLHSMDAYTGLTEYPAPMLLQLDGFSEVRSSGLQMTRSPGALLVYLGSVLLVLGTVLMFYVREKRAWVLFSDGKIRFAMSSARSERDLQKEFPKHVESLQRLGKDLNHD

SEQ ID NO: 3349 - protein, 425 aa, Neisseria
ILVQDLPFEVKLKKFHIDFYNTGMPRDFASDIEVTDKATGEKLERTIRVNHPLTLHGITIYQASFADGGSDLTFKAWNLGDASREPVVLKATSIHQFPLEIGKHKYRLEFDQFTSMNVEDMSEGAEREKSLKSTLNDVRAVTQEGKKYTNIGPSIVYRIRDAAGQAVEYKNYMLPVLQEQDYFWITGTRSGLQQQYRWLRIPLDKQLKADTFMALREFLKDGEGRKRLVADATKGAPAEIREQFMLAAENTLNIFAQKGYLGLDEFITSNIPKEQQDKMQGYFYEMLYGVMNAALDETIRRYGLPEWQQDEARNRFLLHSMDAYTGLTEYPAPMLLQLDGFSEVRSSGLQMTRSPGALLVYLGSVLLVLGTVLMFYVREKRAWVLFSDGKIRFAMSSARSERDLQKEFPKHVESLQRLGKDLNHD

SEQ ID NO: 3350 - protein, 297 aa, Neisseria; identical to SEQ ID NO: 286

SEQ ID NO: 3351 - protein, 288 aa, Neisseria
  VARIANT (1)...(288): Xaa = Any Amino Acid
MFRLQFRLFPPLRTAMHILLTALLKCLSLLPLSCLHTLGNRLGHLAFYLLKEDRARIVANMRQAGLNPDPKTVKAVFAETAKGGLELAPAFFRKPEDIETMFKAVHGWEHVQQALDKHEGLLFITPHIGSYDLGGRYISQQLPFPLTAMYKPPKIKAIDKIMQAGRVRGKGKTAPTSIQGVKQIIKALRSGEATIVLPDHVPSPQEGGEGVWVDFFGKPAYTMTLAAXLAHVKGVKTLFFCCERLPGGQGFDLHIRPVQGELNGDKAHDAAVFNRNAEYWIRRFPTHI

SEQ ID NO: 3352 - protein, 298 aa, Neisseria
MFRLQFRLFPPLRTAMHILLTALLKCLSLLPLSCLHTLGNRLGHLAFYLLKEDRARIVANMRQAGMNPDPKTVKAVFAETAKGGLELAPAFFRKPEDIETMFKAVHGWEHVQQALDKHEGLLFITPHIGSYDLGGRYISQQLPFPLTAMYKPPKIKAIDKIMQAGRVRGKGKTAPTSIQGVKQIIKALRSGEATIVLPDHVPSPQEGGEGVWVDFFGKPAYTMTLAAKLAHVKGVKTLFFCCERLPGGQGFDLHIRPVQGELNGDKAHDAAVFNRNAEYWIRRFPTQYLFMYNRYKMP

SEQ ID NO: 3353 - protein, 298 aa, Neisseria; identical to SEQ ID NO: 284

SEQ ID NO: 3354 - protein, 520 aa, Neisseria
MAVFDEVGRIAHGCGGVVKQSLFLRVVHQVEQGARLAEVVVIVLAVVPVCRVAVDFQRRFGEVGLLLPLAEAVGFVVRQAAVVAVGAALSVALVAVNRATRTIDGDLAEVHTQAVTLRVGVIEQTGLQHFIRARADTGNEVARCEGGLFHIGEEVFGIAVQLEFAHFNQRIVFFRPNFGQVKRMIRHFFGIGFRHDLDVHRPFRELAALDGFVQVALMAFAVVGDDFCSFFVGQVFNPLLAAEMEFHPKTFARFVPEAVGMRTEAVHMAVAGGNTAVAHHDGNLVQGFGQQRPEVPVVCGGTHIGARIAFDGFVQVGEFARVAQEEHGRVVADHIPVAFFGIEFQRKTADVAFRIGCAALACHGGETGEHLGFFADFAENFGAGVFGDVVCYGKRTERARTFGVHTAFGDDFAHEVGEFFIQPQILRQQGAARAGGQAVLIVGNGRAVVHGQMGYGAFGGSHRSCSFSQVGQMGGKRLTVRFGGKRIRNRFLDCNKFLESTFYFPFAKTMDAIIRQDFRY

SEQ ID NO: 3355 - protein, 520 aa, Neisseria
  VARIANT (1)...(520): Xaa = Any Amino Acid
MAVFDEVGRVAHCGGGVAEQCLFLRVVHQVEQGARLAEIVVIVLAVVPVCRVAVDFQRRFGESGLLLPLAEAVGFVVRQAAXVAVGAALPVAXXAVNXATRTIDGNLAEVYAQTVALCVGVIEQTRLQHFIXAGADTGNEVARCEGGLFHIGEEVFGIAVQLEFAHFNQRIVFFRPNFGQVKRMIRYFFRVCFRHDLDVHRPFRKLAAFDGFXXVALMAFAVVGDDFGGFFVGQVFNALLGAEMEFHPKTLACFVPEAVGMRTEAVHMAVAGGDAAVAHHDGNLVQCFGQQRPEVPVVCGRAHIGARVAFDGFVQVGELTRVAQEEHGRVVADHIPVAFFGIKFQGKTADVAFCIGCAAFACHGGETGEHLGFFADFAEDFGAGVFGDVVRYGKRTERARTFGVHTAFGDDFAHEVGEFFIQPQILRQQRAARTGGQAVLIVGNRRAVVHGQMGYRAFGGSHRSCSFSQVGQMGGKRLTVRFGGKRIRNRFLDCNKFLESTFYFPFVKTMDATIRQDFRY

SEQ ID NO: 3356 - protein, 520 aa, Neisseria
  VARIANT (1)...(520): Xaa = Any Amino Acid
MAVFDEVGRVAHCGGGVAEQCLFLRVVHQVEQGARLAEIVVIVLAVVPVRRVAVDFQRRFGEVGLLLPLAEAVGFVVRQAAVVAVGASLSVALVAVNRATRTVDRDLAEVHAQAVALRVGVIEQTRLQHFIWAGADTGNEVARCEGGLFHIGEEVFGIAVQLEFAHFNQRIVFFRPNFGQVKRMIRHFFRIGFRHDLDVHRPFRKLAALDGFVQVALMAFTVVGDDFGGFFVGQVFNALLGAEMEFHPKTLACFVPEAVGMRTEAVHMAVAGGDAAVAHHDGNLVQCFGQQRPEVPVVCGRAHIGARVAFDGFVQVGELTRVAQEEHGRVVADHIPVAFFGIELQRKTADVAFCIGCAAFACHGGETGEHLGFFADFAEDFGAGVFGDVVRYGKRTERARTFGVHTAFGDDFAHEVGEFFIQPQILRQQRAARTGGQAVLIVGNRRAVVHGQMGYRAFGGXHRSCSFSQVGQXGGKRLTVRFGGKRIRNRFLDCNKFLESTFYFPFVKTMDATIRQDFRY

SEQ ID NO: 3357 - protein, 185 aa, Neisseria
MLLPALQQGGGFLSGGGFGLVGQVQGLVFLLQTAFALFVLGNGLFGMGKLLLLQRQFAADAVCLVLLGLEGSVERGLDFFQFGQTLFVFGNLHRPFRQFGLLFFDLQLVFLKLHADLLLLLPDALQLRLRCLLVAFDALVQVLPVADLFFQTGNLLAQHAAFVAQFVYCLLLRLFGSLQGVYFVI

SEQ ID NO: 3358 - protein, 185 aa, Neisseria
  VARIANT (1)...(185): Xaa = Any Amino Acid
MLLLTLQQGGCFLRGGGFGFVGQVXGLVFLFQTTFALFVLGNRLFGMGKLLLLQRQFAADAVCLVLLGLEGGVERGLGFFQFGQTLLVFGNLHRPFRQLGLFFFDLQLVFFKLHADLLLLLMNALXLRLRCLLVAFDALVQVLLMADLFFQTGNLLAQHAALVAQFMHCLLLRLFGSLQGVYFVV

SEQ ID NO: 3359 - protein, 185 aa, Neisseria
MLLLALQQGGSFLRGGGFGFVRQIQGLVFLFQTTFALFVLGNGLFGMGKLLLLQRQFAADAVCLVLLGLEGGIECGLGFFQFGQTLFVFGNLHRPFRQFGLLFFRLQLVFFKLHADLLLLLMDALHLRLRRLLVAFDALVQVLLMADLFFQTGNLFAQHAAFVAQFVHRLLLRLFGSLQGVYFVV

SEQ ID NO: 3360 - protein, 167 aa, Neisseria
MVAFGVDQGLLLLQQGGLGGGLKLRQLGLQGLYAGVLLPALFLNLREFFLHGDVFFVQRVYGFGQLVELDVLLVVLELGFIGEGKLLPAFLPVQGLLFEPGDLLPVVLFLRVEFVDGDFGKPVLAVGFQQGKLRLFQTALLLLAAVRGGLLLVFEFGGGFLQSSDVV

SEQ ID NO: 3361 - protein, 167 aa, Neisseria
  VARIANT (1)...(167): Xaa = Any Amino Acid
MVAFGVDQGFLLLQQGGLGGGLKLRQLGLQGLHFSVLLPALFLNLREFLLHNNIFFVQGLYGFAXFFKLDVLLVVLELGFIGEGKLLLAFLPVEGLLFKLGDLLPVVLFLLVEFVDGDFGKPVLAVGFQQGKLRLFQTALLLLAAVRGGLLLVFEFGGGFLQGNDVV

SEQ ID NO: 3362 - protein, 167 aa, Neisseria
MVAFGVDQGFLLLQQGGLGGGLKLRQLGLQGLYAGVLFPTLLLNLREFLLYDNIFFVQTLYGFAQLFELDVLLVVLELGFIGEGKLLLAFLPIEGLLFKLGNLLLVVLFLLVELVDGDFGKPVLAVGFQQGKLRLFQTTLLLLAAVRGGLLLVFEFGGGFLQNGDVV

SEQ ID NO: 3363 - protein, 574 aa, Neisseria
MVAVCDERAVQRTLVAQFAQQGGLFLLFVQAVVVFQACVLEKLGNHIGVFACVLAQVERHHVEAEHGHGTDEVCQTAFGKQAAAVVDKGTLQFFQIIEKFLGRSIRLEKAEFAAHAQTERARFAHSARHNVGNGAAVRFFGAGDFFVRREGCQCHYVVVDFDAADGKRQFAVKFVEFAAVKTEHGIGVAAEGKAQGFARNKRIAVAVAADPAADFKDIRNADIGIGRLKVVFHLAVEFGQGFKKAHREDGHAVVDFVVDAEFVAARFAGLPQAQKHGVDFAAQPCQRVGIGAAFALRQQRADAAVEIQNGLALHFGRVRGQNGGNGRIVQLPLHRFAVGFPRFEPADGFRQAAFCCVVAGIFVDLAAAFVVHVFGDIQNLGEQPAGKRQIVGLPFVQLRQYFFNQCRAVVGSGQEFDRFDNQRRGFFVQEVEQGLFQKFRVRRQSRVLRIVQDMQLHDFPLIAVNTVNVPQMPHPCQTVHTLTTHVPKCRLKLNAARRRRYNRPQLFFSEHHHDRDRTRQRRRTPAAVQPPHPLGRNRHRRAAEAFRRAYFGRRLRRIGRRRPCPISPPRGSAR

SEQ ID NO: 3364 - protein, 575 aa, Neisseria
  VARIANT (1)...(575): Xaa = Any Amino Acid
MVAVCDKRAVQRTLMAQFAQQGGLFLLFVQAVVVFQACVLEKLGNHIGVFACVLAQVERHHVKAEHGYGTDEVCQTAFGKQTAAVVDKGTLQFFQIIQKLLCRSIRLEKAEFAAHTQTERARFAHSARHNVGDGAAVGFFGAGDFFVGRFVGQRRYIAVDFDAADGERQFAVEFVEFAAIEAEHGIGVAAEGKAQGFGRNKRIAVAVAADPAADFEDVRNADAGIGRLKVVFHLAVELGQGFEKAHREDGHAVVDFVVDAEFVAARFAGLPQAQQDSVDFAAQPCQRVGIGAAFALRQQCADAAVEAXDGLALHFGRVRGQNGGNGRIVQLPLHRFAVGFPRFEPADGFRQAAFRAAASGFFVDLAAAFVVHVFGDVQNLGEQAAGQGXIVGLLFVQLRQYFFNQCRAVVGSGQEFDCFDNQRRGFFVQEVEQGLFQKFRVRRQSRVLWIVQNMQLHDFSLSSAVNIVNVPQMPHPCQTVHTLTARVPKCRLKLNAARRQRYNRPQLFFSEHHHDHDRTRQRRCIPAAVQPPHPLGRNRHRRAAETFRRAYFGRRLRRFGCRRTXPTLPLRVSAR

SEQ ID NO: 3365 - protein, 573 aa, Neisseria
  VARIANT (1)...(573): Xaa = Any Amino Acid
MVAVCDERTVQWTLMAQFAQQGGLFLLFVEAVVVFQACVLEKLGNHIGVFACVLAQVERHHVEAEHGYGTDEVCQTAFGKQAAAVVDKGMLQFFQIIEKFLCRSIRLEKAEFAAHTQTERARFAHSARHNVGNGATVGFFGAGGFFVGRFVGQRHHIAVDFDAADGERQFAVEFVEFATVKTEHGIGVAAEGKTQGFGRNERIAVAVAADPAADFEDVRNADIGIGRLKVVFHLAVELGQGFKKAHRKDGHAVVDFVVDAEFVAARFAGLPQAQQDSVDFAAQPCQRVGIGTAFALRQQRADAAVEIQDGLALHFGRVRGQNGGNGRIVQLPLHRFAVGFPRFEPADGFRQAAFRAAASGFFVDLAAAFVVHVFGDVQNLGEQAAGQGIVGLLFVQLRQYFFNQCRAVVGSGQEFDRFDNQRRGFFVQEVEQGLFQKFRVRRQSRVLWIVQNMQLHDFSLIAVNTVNVPQMPHPCQTVHTLTARVPKCRLKLNAARRQRYNRPQLFXSEHHHDHDRTRQRRCIPAAVQPPHPLGRNWHRRAAETFRRAYFGRRLRRFGCRXPCPISPLPASAR

SEQ ID NO: 3366 - protein, 132 aa, Neisseria
MPSRTPQGKRGYSCPKRDSAFWQALSISVILRAKSPIAKSPPFREVFNRSWTTLSAAIMTIFSLSATRPPSRMASALPLSIPTACNSVSFSSAGVLTVSRGVHDFDVDLFDVHPLILIAAFPAVGGGALPVR

SEQ ID NO: 3367 - protein, 132 aa, Neisseria
  VARIANT (1)...(132): Xaa = Any Amino Acid
MPSRTPQGKRGYSCAKRDSAFWQALSISAILRAKSPIAKSPPFREVFNRSWTTLSAAIMTIFSLSATRPPSRMASALPLSIPTACNSVSFSSAGVLTVSRGVXDFXVDLFDVHPLILIAAFPAIGGGALPVR

SEQ ID NO: 3368 - protein, 132 aa, Neisseria
  VARIANT (1)...(132): Xaa = Any Amino Acid
MPSRTPQGKRGYSCAKRDSAFWQALSISAILRAKSPIAKSPPFREVFNRSWTTLSAAIMTIFSLSATRPPSRMASALPLSIPTACNSVSFSSAGVLTVSRXVHDFDVDLFDVHPLILIAAFPAVGGGALPVR

SEQ ID NO: 3369 - protein, 277 aa, Neisseria
MKVLVLGAGVAGVSSVWYLAEAGHEVTVIDRTEGVAMETSFANAGQLSYGYTTPWAAPGIPTKALKRLFKSHPPLLFRPDGGLYQIEWLWRMLQNCTATRYQINKERMVRISEYSREMFRRFEAQTDMNFEGRKKGTLQIFRQTEEVEAAKQDIAVLERYGVPYRRLKPEECAEFEPALARVTAKIVGGLHLPADATGDCRLFTENLYKLCQEKGVRFYFNQTISRIDHNGLRIKAVETKQGGLKQMPLSARSAASAGLCWRSWISICPFIPSKAIP

SEQ ID NO: 3370 - protein, 122 aa, Neisseria
VLERYGVPYRRLKPEECAEFEPALARVTAKIAGGLHLPADATGDWRLFTENLYKLCQEKGVRFHFNQNISRIDHNGLRIKTVETKQGGLKQMPLSARSVASAGRFWRSWISICPFIPSKAIP

SEQ ID NO: 3371 - protein, 277 aa, Neisseria
MKVLVLGAGVAGVSSAWYLAEAGHEVTVIDRAEGVAMETSFANAGQLSYGYTTPWAAPGIPTKALKWLFKSHPPLLFRPDGSLYQIEWLWQMLQHCTAARYQINKERMVRMSEYSREMFRRFEAQTGMNFEGRKKGTLQIFRQTKEVEAAKQDIAVLERYGVPYRRLKPEECAEFEPALARVTAKIAGGLHLPADATGDCRLFTENLYKLCQEKGVRFHFNQTISRIDHNGLRIKTVETKQGGLKQMPLSARSAASAGRFWRKWISICRFIPSKAIP

SEQ ID NO: 3372 - protein, 191 aa, Neisseria
MGSAPNAAAAAEVKHPVSQGMIQMLGVFVDTIIVCSCTAFIILIYQQPYGDLSGAALTQAAIVSQVGQWGAGFLAVILFMFAFSTVIGNYAYAESNVQFIKSHWLITAVFRMLVLAWVYFGAVANVPLVWDMADMAMGIMAWINLVAILLLSPLAFMLLRDYTAKLKMGKDPEFKLSEHPGLKRRIKSDVW

SEQ ID NO: 3373 - protein, 191 aa, Neisseria; identical to SEQ ID NO: 3372

SEQ ID NO: 3374 - protein, 475 aa, Neisseria
  VARIANT (1)...(475): Xaa = Any Amino Acid
MNENFTEWLHGWVGAINDPMWSYLVYXLLGTGLFFTVTTGFVQFRLFGRSIKEMLGGRKQGDDPHGITPFQAFVTGLASRVGVGNIAGVAIAIKVGGPGAVFWMWVTALIGMSSAFVESSLAQLFKVRDYDNHHFRGGPAYYITQGLGQKWLGVLFALSLIFCFGFVFEAVQTNTIADTVKAAWGWEPHYVGVALVILTAPIIFGGIRRISKAAEIVVPLMAVLYLFIALFIILTNIPMIPDVFGQIFSGAFKFDAAAGGLLGGLISQTMMMGIKRGLYSNEAGMGSAPNAAAAAEVKHPVSQGMIQMLGVFVDTIIVCSCTAFIILIYQQPYGDLSGAALTQAAIVSQVGQWGAGFLAVILFMFAFSTVIGNYAYAESNVQFIKSHWLITAVFRMLVLAWVYFGAVANVPLVWDMADMAMGIMAWINLVAILLLSPLAFMLLRDYTAKLKMGKDPEFKLSEHPGLKRRIKSDVW

SEQ ID NO: 3375 - protein, 359 aa, Neisseria
MVQIQVVRAAGVARGLHSEFARAVTAEEIAFDNAVLNHEARRGGNTFRIKIAAAERAGDVRFFAQVEEIGQDFFADAVDQETALAVERAAGECADEVSDQPARNGGIEEDGVAACRDAAAAESAQSAAGGGLTDGFGAVHIRMAAGGIVPVVALHSVFVGGDDAAGNAVVRALPVCGKTVGVAVNVLVLSGLHRRAFGVFDAAVRVQRCLFALFCQADGGFRIQIPFVVKVGVADVLRHQLGVGKSGATVFGGVAGDVGGGADGVAQGLFGEVGGAGAAFAFADVNGNVQRFVLLELDLFDFAQAHADALSERFAEVGFGGGRARCFCQVERAAAEVEEFGSGVVEQHNNLSWWSVVAF

SEQ ID NO: 3376 - protein, 305 aa, Neisseria
  VARIANT (1)...(305): Xaa = Any Amino Acid
GKSGGCAFFAQVEEIGQDFSADAVDQETALAVERAAGECADEVSDKTARNGGIEEDGVAACRDAAAAESAQSAAGGGLTDGFGAVHIRMAAGGIVPVVALHAVFVGGNDAAGNAVVRALPVCGKTVGVAVNVLVMAGLHRRAFGVFDALILVQGGLFALFCQADGGXRIQIPFVVKVGVADVFCHQTGIGKSGATVFGGVAGDVDGGFDGVLQGFFGEVGSTGAAFAFADVNGNVQRLVLLELDLXDXAQPHADALSQXFAEIGFGGGCARRFCQVERAAAEVEEFGSGVVEQHRNLSXXCFAAF

SEQ ID NO: 3377 - protein, 356 aa, Neisseria
  VARIANT (1)...(356): Xaa = Any Amino Acid
MVQIKVVRAAGVARGLHSEFARAVTAEEIAFDNAVLNHEARCGGNAFRIKIAAAERAGDVRFFAQVEEIGQDFFADAVDQETALAVERSAGECADEVSDKTARNGGIEEDGVVACRDAAAAESAQSAAGGGLTDGFGAVHIRMAAGGIVPVVALHAVFVGGNDAAGNAVVRALPVCGKTVGVAVNVLVMAGLHRRAFGVFDALILVQGGLFALFCQADGGFRIQIPFVVKVGVADVLRHQLGVGKSGATVFGGVAGDVXXGADGVAQGLFGEIGGAGAAFAFADVNGNVQRLVLLKLDLFDFAQPHADALSQFAEIGFGGGCARRFCQVERAAAEVEEFGSGVVEQHRNLSCFAAF

SEQ ID NO: 3378 - protein, 359 aa, Neisseria
MVQIQVVRAAGVARGLHSEFARAVTAEEIAFDNAVLNHEARRGGNTFRIKIAAAERAGDVRFFAQVEEIGQDFFADAVDQETALAVERAAGECADEVSDQPARNGGIEEDGVAACRDAAAAESAQSAAGGGLTDGFGAVHIRMAAGGIVPVVALHSVFVGGNDAAGNAVVRALPVCGKTVGVAVNVLVVSGLHRRAFGVFDAAVRVQRCLFALFCQADGGFRIQIPFVVKVGVADVLRHQLGVGKSGATVFGGVAGDVGGGADGVAQGLFGEVGGAGAAFAFADVNGNVQRFVLLELDLFDFAQAHADALSERFAEVGFGGGRARCFCQVERAAAEVEEFGSGVVEQHNNLSWWSVVAF

SEQ ID NO: 3379 - protein, 312 aa, Neisseria
MVQIQVVRAAGVARGLHTEFARAVTAEEIAFDNAVLNHEARCGGNAFRIKIAAAERAGDVRFFAQVEEIGQDFFADAVDQETALAVERAAGECADEVSDKTARNGGIEEDGVAACRDAAAAESAQSAAGGGLTDGFGAVHIRMAAGGIVPVVALHAVFVGGNDAAGNAVVRALPVCGKTVGVAVNVLVMAGLHRRAFGVFDALILVQGGLFALFCQADGGFRIQIPFVVKVGVADVFCHQTGIGKSGATVFGGVAGDVDGGFDGVLQGFFGEVGSTGAAFAFADVNGNVQRLVLLELDLFDFAQPHADALSQ

SEQ ID NO: 3380 - protein, 312 aa, Neisseria
MVQIKVVRAAGVARGLHSEFARAVTAEEIAFDNAVLNHEARCGGNAFRIKIAAAERAGDVRFFAQVEEIGQDFFADAVDQETALAVERSAGECADEVSDKTARNGGIEEDGVVACRDAAAAESAQSAAGGGLTDGFGAVHIRMAAGGIVPVVALHAVFVGGNDAAGNAVVRALPVCGKTVGVAVNVLVMAGLHRRAFGVFDALILVQGGLFALFCQADGGFRIQIPFVVKVGVADVLRHQLGVGKSGATVFGGVAGDVGGGADGVAQGLFGEIGGAGAAFAFADVNGNVQRLVLLKLDLFDFAQPHADALSQ

SEQ ID NO: 3381 - protein, 237 aa, Neisseria; identical to SEQ ID NO: 81

SEQ ID NO: 3382 - protein, 238 aa, Neisseria; identical to SEQ ID NO: 79

SEQ ID NO: 3383 - protein, 237 aa, Neisseria; identical to SEQ ID NO: 80

SEQ ID NO: 3384 - protein, 167 aa, Neisseria
MHRVSDGIGVSVVFCRFVGFDDFLHQRMPDNVFAGEGMEIQSCHAVQFLTCVFQSRFDVFGQVDLAGVAGNDGFRAEADAGQEHFHLFGRGVLRFVEDDVCAVERPAAHIGERGDFNQAFFNQLGYTVKAHQVIEGIIKRTEVGVDFLGQVSGQEAQFLTGFDGRPN

SEQ ID NO: 3385 - protein, 167 aa, Neisseria
  VARIANT (1)...(167): Xaa = Any Amino Acid
MHRVSDGIGMSVVFCRFVGFDDFLHQRMPDNVFAGKGVEIQPFHVVQFLTRIFXSRFDVFGQVDLAGVAGNDGFRAEADAGQEHFHLFGRGVLRFVEDDVCAVERPAAHIGERGDFNQAFFNQLGYTVKAHQVIEGIIKRTKVGIDFLGQVSGQEAQFLAGFDGWAH

SEQ ID NO: 3386 - protein, 185 aa, Neisseria
NEISSIAMENINGITIDISMHRVSDGIGMSVVFCRFVGFDDFLHQRMPDNVFAGKGVEIQPFHAVQFLTRIFSRFDVFGQVDLAGVAGNDGFRAEADAGQEHFHLFGRGVLRFVEDDVCAVERPAAHIGERGNLNQTFFNQLGDTVEAHQVIEGIIKRTKVGIDFLGQVTGQKTQFLAGFDGRPH

SEQ ID NO: 3387 - protein, 115 aa, Neisseria
MTFSAAKLNISALMLCLSAGMTVLLSAFLLLRPEGSILFNHFFSINILTRRAASPRATVFRLHQAVRFHKMPKTISKMRRNYAVRITPPPRAATLHYNRLPLKKSDPAFVAESEI

SEQ ID NO: 3388 - protein, 133 aa, Neisseria
  VARIANT (1)...(133): Xaa = Any Amino Acid
MTFSAAKLNISARMLCLSAGMTVLLSAFLLLRPEGSILFNHFFSINILTRRAASPQATVFRRHQARFARCRTINKRRRNYAVRITPPSXAATRHYNRLPSAAGLVRRERRRCAVILSNGRKKSDPAFVAESEI

SEQ ID NO: 3389 - protein, 114 aa, Neisseria
  VARIANT (1)...(114): Xaa = Any Amino Acid
MTFSAAKLNISARMLCLSAGMTVLLSAFLLLRPEGSILFNHFFSINILTRRAASPRATVFRRHQAVRFRKMPTINKRRRNYAVRITPSSXAATRHYNRLPSKKSDPAFVAESEI

SEQ ID NO: 3390 - protein, 316 aa, Neisseria
MEFFIILLAAVAVFGFKSFVVIPQQEVHVVERLGRFHRALTAGLNILIPFIDRVAYRHSLKEIPLDVPSQVCITRDNTQLTVDGIIYFQVTDPKLASYGSSNYIMAITQLAQTTLRSVIGRMELDKTFEERDEINSTVVSALDEAAGAWGVKVLRYEIKDLVPPQEILRAMQAQITAEREKRARIAESEGRKIEQINLASGQREAEIQQSEGEAQAAVNASNAEKIARINRAKGEAESLRLVAEANAEANRQIAAALQTQSGADAVNLKIAGQYVTAFKNLAKEDNTRIKPAKVAEIGNPNFRRHEKFSPEAKTAK

SEQ ID NO: 3391 - protein, 199 aa, Neisseria
SVIGRMELDKTFEERDEINSTVVAALDEAAGAWGVKVLRYEIKDLVPPQEILRSMQAQITAEREKRARIAESEGRKIEQINLASGQREAEIQQSEGEAQAAVNASNAEKIARINRAKGEAESLRLVAEANAEAIRQIAAALQTQGGADAVNLKIAEQYVAAFNNLAKESNTLIMPANVADIGSLISAGMKIIDSSKTAK

SEQ ID NO: 3392 - protein, 315 aa, Neisseria
MEFFIILLAAVVVFGFKSFVVIPQQEVHVVERLGRFHRALTAGLNILIPFIDRVAYRHSLKEIPLDVPSQVCITRDNTQLTVDGIIYFQVTDPKLASYGSSNYIMAITQLAQTTLRSVIGRMELDKTFEERDEINSTVVSALDEAAGAWGVKVLRYEIKDLVPPQEILRSMQAQITAEREKRARIAESEGRKIEQINLASGQREAEIQQSEGEAQAAVNASNAEKIARINRAKGEAESLRLVAEANAEAIRQIAAALQTQGGADAVNLKIAEQYVAAFNNLAKESNTLIMPANVADIGSLISAGMKIIDSSKTAK

SEQ ID NO: 3393 - protein, 315 aa, Neisseria
MEFFIILLAAVAVFGFKSFVVIPQQEVHVVERLGRFHRALTAGLNILIPFIDRVAYRHSLKEIPLDVPSQVCITRDNTQLTVDGIIYFQVTDPKLASYGSSNYIMAITQLAQTTLRSVIGRMELDKTFEERDEINSTVVSALDEAAGAWGVKVLRYEIKDLVPPQEILRAMQAQITAEREKRARIAESEGRKIEQINLASGQREAEIQQSEGEAQAAVNASNAEKIARINRAKGEAESLRLVAEANAEAIRQIAAALQTQGGADAVNLKIAEQYVAAFNNLAKESNTLIMPANVADIGSLISAGMKIIDSSKTAK

SEQ ID NO: 3394 - protein, 315 aa, Neisseria; identical to SEQ ID NO: 1776

SEQ ID NO: 3395 - protein, 315 aa, Neisseria; identical to SEQ ID NO: 3392

SEQ ID NO: 3396 - protein, 197 aa, Neisseria
MPALLSIRRANALPFSRISERMKLLVPLIMPAMDLILFAAKPSRTALMIGIPPATAASNWTMTFCFSASGKISLPYSASSFLLAVTMCLPFSMAFNTASLAMPVPPNNSTKTSTSLRANSSNGSFDKGGRRADFGGLFLRLSRTWQKYGFRAPSGGKFPLRCPATRQPHRRRPYLSLKDRCLLASLCLLVSRLKCKY

SEQ ID NO: 3397 - protein, 197 aa, Neisseria
  VARIANT (1)...(197): Xaa = Any Amino Acid
MPALLSVHXANALPFSRISXRMKLLVPLIMPAMDLILFAAKPSRRALMIGIPPATAASNWTMTFCFSASGKISLPYSASSFLLAVTMCLPFSMAFNTASLAMPVPPNNSTTTSTSSRATSSNGSLTKAXRTGRFVGLFLHSNRTRQKYGFRAPSDGKFPPRCXATRQPYRRRPYPNLKDRCLLASLCLLVSRLKCKY

SEQ ID NO: 3398 - protein, 197 aa, Neisseria
  VARIANT (1)...(197): Xaa = Any Amino Acid
MPALLSVHRXNALPFSRISERMKLLVPLIMPAMDLILFAAKPSRRALMIGIPPATAASNWTMTFCFSASGKISLPYSASSFLLAVTMCLPFSMAFNTASLAMPVPPNNSTTTSTSSRATSSNGSLTKAXRTGRFVGLFLHSNRTRQKYGFRAPSDGKFPPRCPATRQPYRRRPYPNLKDRCLLASLCLLVSRLKCKY

SEQ ID NO: 3399 - protein, 173 aa, Neisseria
MKLLVPLIMPAMDLILFAAKPSRRALMIGIPPATAASNWTMTFCFSASGKISLPYSASSFLLAVTMCLPFSMAFNTASLAMPVPPNNSTTTSTSLRATSSNGSLTKAADGQIWRAFSSLKSHMAEIRISRPKRREISSALSRNTAAAPPPTVPKPKRPMFTGFIVSPCKPTEM

SEQ ID NO: 3400 - protein, 173 aa, Neisseria
MKLLVPLIMPAMDLILFAAKPSRRALMIGIPPATAASNWTMTFCFSASGKISLPYSASSFLLAVTMCLPFSMAFNTASLAMPVPPNNSTTTSTSSRATSSNGSLTKAADGQVCRAFSSLKSHTAEIRISRPKRREISSALSRNTAAVPPPTVPKPKRPMFTGFIVSPCKPTEM

SEQ ID NO: 3401 - protein, 173 aa, Neisseria; identical to SEQ ID NO: 3400

SEQ ID NO: 3402 - protein, 169 aa, Neisseria
MKSKLPLILINLSLISSPLGANAAKIYTCTINGETVYTTKPSKSCHSTDLPPIGNYSSERYILPQTPEPAPSPSNGGQAVKYKAPVKTVSKPAKSNTPPQQAPVNNSRRSILEAELSNERKALTEAQKMLSQARLAKGGNINHQKINALSNVLDRQQNIQALQRELGRM

SEQ ID NO: 3403 - protein, 171 aa, Neisseria
  VARIANT (1)...(171): Xaa = Any Amino Acid
MKSKLLLILINFSLISSPLGANAAKIXTCTINGETVYTXKPSKSCHSTDLPPIGNYSSERYIPPQTPEPVSSPSNGGXVVKYKAPVKTVSKPAKSXTPPPQQAPSNNSRRSILETELSNERKALVEAQKMLSQARLAKGGNINHQEINALQSNVLDRQQNIQALQRELGRM

SEQ ID NO: 3404 - protein, 170 aa, Neisseria
MKSKLPLILINFSLISSPLGANAAKIYTCTINGETVYTTKPSKSCLSTDLPPIGNYSSERYIPPQTSEPTPSPSNGGQAVKYKAPVKTVSKPAKSNTPPPQQAPSNNSRRSILETELSNERKALVEAQKMLSQARLAKGGNINHQEINALQSVLDRQQNIQALQRELGRM

SEQ ID NO: 3405 - protein, 144 aa, Neisseria
MTEPKHETPTEEQVAARKKAKAKIRTIRIWAWVILALLASTALLSQCAMSKPQAKQKIVESCMKNIPFAEKWQNDLKARGLDADNTRLAVDYCKCMWEQPLDGLSEKQISSFGKLGAQEQLDLLGGANAFETRDKQCVADLKAD

SEQ ID NO: 3406 - protein, 144 aa, Neisseria; identical to SEQ ID NO: 1784

SEQ ID NO: 3407 - protein, 144 aa, Neisseria
MTEPKHEMPTEEQVAARKKAKAKIRTIRIWAWVILALLASTALLSQCAMSKPQAKQKIVESCVKNIPFAEKWQNDLRARGLDSNNTRLTVDYCKCMWEQPLDRLSEKQISSFGKLGAQEQLDLLGGANAFETRDKQCVADLKSE

SEQ ID NO: 3408 - protein, 135 aa, Neisseria; identical to SEQ ID NO: 33

SEQ ID NO: 3409 - protein, 126 aa, Neisseria; identical to SEQ ID NO: 31
  VARIANT (1)...(126): Xaa = Any Amino Acid

SEQ ID NO: 3410 - protein, 135 aa, Neisseria; identical to SEQ ID NO: 32

SEQ ID NO: 3411 - protein, 186 aa, Neisseria
MKYVRLFFLGTALAGTQAAAAEMVQIEGGSYRPLYLKKDTGLIKVKPFKLDKYPVTNAEFAEFVNSHPQWQKGRIGSKQAEPAYLKHWMKNGSRSYAPKAGELKQPVTNISWFAANAYCAAQGKRLPTIDEWEFAGLASATQKKRLKRTRLQPHYSRLVCRRRTERPARCRQSTARTTGVFMICTG

SEQ ID NO: 3412 - protein, 186 aa, Neisseria
  VARIANT (1)...(186): Xaa = Any Amino Acid
MKYVRLFXLGAALAXTQXAAAEMVQIEGGSYRPLYLKKDTGLIKVKPFKLDKYPVTNAEFAEFVNSHPQWQKGRIGSKQAEPAYLKHWMKNGSRSYAPKAGELKQPVTNVSWXAANAYCAAQGKRLPTIDEWEFAGLASATQKXRLKRTRLQPHYSRLVCRRRTERPARCRXKAARTTGAFMICTG

SEQ ID NO: 3413 - protein, 186 aa, Neisseria
  VARIANT (1)...(186): Xaa = Any Amino Acid
MKFTRLLFLCAALAGTQAAAAEMVQIEGGSYRPLYLKKDTGLIKVKPFKLDKYPVTNAEFAEFVNSHPQWQKGRIGSKQAEPAYLKHWMKNGSRSYAPKAGDLKQPVTNVSWFAANAYCAAQGKRLPTIDEWEFAGLASATQXKRLKRTRLQPHYSRLVCGWRPERPARCRQXVARTTGAFMICTV

SEQ ID NO: 3414 - protein, 251 aa, Neisseria
MKYVRLFFLGTALAGTQAAAAEMVQIEGGSYRPLYLKKDTGLIKVKPFKLDKYPVTNAEFAEFVNSHPQWQKGRIGSKQAEPAYLKHWMKNGSRSYAPKAGELKQPVTNISWFAANAYCAAQGKRLPTIDEWEFAGLASATQKNGSNEPGYNRTILDWYADGGRKGLHDVGKDRPNYWGVYDMHGLIWEWTEDFNSSLLSSGNANAQMFCSGASVGASDSSNYAAFLRYGIRTSLQSKYVLHNLGFRCASR

SEQ ID NO: 3415 - protein, 251 aa, Neisseria; identical to SEQ ID NO: 2159

SEQ ID NO: 3416 - protein, 251 aa, Neisseria
MKFTRLLFLCAALAGTQAAAAEMVQIEGGSYRPLYLKKDTGLIKVKPFKLDKYPVTNAEFAEFVNSHPQWQKGRIGSKQAEPAYLKHWMKNGSRSYAPKAGDLKQPVTNVSWFAANAYCAAQGKRLPTIDEWEFAGLASATQKNGSNEPGYNRTILDWYADGDRKDLHDVGKGRPNYWGVYDMHGLIWEWTEDFNSSLLSSGNANAQMFCSGASIGSSDSSNYAAFLRYGIRTSLQSKYVLHNLGFRCTSR

SEQ ID NO: 3417 - protein, 150 aa, Neisseria
MVLPVSFFQPVQLAAVALGRSAVGMGGSDAAELVELFALFPQCCRFRVFFIQKPRLGCRAALVVQTFNLDFMGKGIERQVDNIADVYGFTVFDFRAVYLNPTQFDMLLRKGTGLEKTCRPKPFVQPHGGRIVLVFHTILFEIIEFVSSLA

SEQ ID NO: 3418 - protein, 150 aa, Neisseria
  VARIANT (1)...(150): Xaa = Any Amino Acid
MVLPVSFFQPVQLAAVALGRSAVGIGGSDAAELVELFALFPQCCRXRVLFIQKPRXGCRAALVVQTFNXDFIGKXNXASVXXIADVYGFTVFDLRAVYLNPTQFDVLLRKGTGLEKTCRPKPFVQPHGGRIVLVFHTILFEIIEFVSSLA

SEQ ID NO: 3419 - protein, 150 aa, Neisseria
MVLPVSFFQPVQLAAVALGRSAVGIGGSDAAELVELFALFPQCCRFRVLFIQKPRLGCRAALVVQTFNLDFIGKGIERQVDNIADVYGFTVFDLRAVYLNPTQFDVLLRKGTGLEKTCRPKPFVQPHGGRIVLVFHTILFEIIEFVSSLA

SEQ ID NO: 3420 - protein, 135 aa, Neisseria; identical to SEQ ID NO: 431

SEQ ID NO: 3421 - protein, 121 aa, Neisseria; identical to SEQ ID NO: 428
  VARIANT (1)...(121): Xaa = Any Amino Acid

SEQ ID NO: 3422 - protein, 135 aa, Neisseria; identical to SEQ ID NO: 430

SEQ ID NO: 3423 - protein, 135 aa, Neisseria; identical to SEQ ID NO: 432

SEQ ID NO: 3424 - protein, 135 aa, Neisseria; identical to SEQ ID NO: 429

SEQ ID NO: 3425 - protein, 135 aa, Neisseria; identical to SEQ ID NO: 430

SEQ ID NO: 3426 - protein, 119 aa, Neisseria
MTHIKPVIAALALIGLAACSGSKTEQPKLDYQSRSHRLIKLEVPPDLNNPDQGNLYRLPAGSGAVRAGDLEKRRTPAVQQPADAGSIEKRQRRPLRAATAANAWLVVDGKSPAEISAAF

SEQ ID NO: 3427 - protein, 375 aa, Neisseria
MTHIKPVIAALALIGLAACSGSKTEQPKLDYQSRSHRLIKLEVPPDLNNPDQGNLYRLPAGSGAVRASDLEKRRTPAVQQPADAEVLKSVKGVRLERDGSQRWLVVDGKSPAEIWPLLKAFWQENGFDIKSEEPAIGQMETEWAENRAKIPQDSLRRLFDKVGLGGIYSTGERDKFIVRIEQGKNGVSDIFFAHKAMKEVYGGKDKDTTVWQPSPSDPNLEAAFLTRFMQYLGVDGQQAENASAKKPTLPAANEMARIEGKSLIVFGDYGRNWRRTVLALDRIGLTVVGQNTERHAFLVQKAPNESNAVTEQKPGLFKRLLGKGKAEKPAEQPELIVYAEPVANGSRIVLLNKDGSAYAGKDASALLGKLHSELR

SEQ ID NO: 3428 - protein, 375 aa, Neisseria
MTHIKPVIAALALIGLAACSGSKTEQPKLDYQSRSHRLIKLEVPPDLNNPDQGNLYRLPAGSGAVRASDLEKRRTPAVQQPADAEVLKSVKGVRLERDGSQRWLVVDGKSHAEIWPLLKAFWQENGFDIKSEEPAIGQMETEWAENRAKIPQDSLRRLFDTVGLGGIYSTGERDKFIVRIEQGKNGVSDIFFAHKAMKEVYGGKDKDTTVWQPSPSDPNLEAAFLTRFMQYLGVDGQQAENASAKKPTLPAANEMARIEGKSLIVFGDYGRNWRRTALALDRIGLTVVGQNTERHAFLVQKAPNESNAVTEQKPGLFKRLLGKGKAEKPAEQPELIVYAEPVANGSRIVLLNKDGSAYAGKDASALLGKLHSELR

SEQ ID NO: 3429 - protein, 99 aa, Neisseria
MSASAAMTGLIWVIVSSCVMDIKVFVMLCRPNGSDGMAIFKVVLRLSGRRGLLPVRLPSAERAAGARAVRIRPRRIPPISVRRDWVRRTWCRKSESAGR

SEQ ID NO: 3430 - protein, 99 aa, Neisseria
  VARIANT (1)...(99): Xaa = Any Amino Acid
XSASAAMTGLIWVIVSSCVMDIKVXVAXCRPNGSDGMXIFKVVLRLSGRRGLLXVRFPSAERAAGGRAVRICPGRIPPISVRRGWVRRTWCRKSESVGR

SEQ ID NO: 3431 - protein, 99 aa, Neisseria
MSASAAMTGLIWVIVSSCVMDIKVFVALCRPNGSDGMAIFKVVLRLSGRRGLLPVRLPSAERAAGGRAVRICPGRIPPISVRRGWVRRTWCRKSESAGR

SEQ ID NO: 3432 - protein, 162 aa, Neisseria
MTALLVILALALIAVGTAGIVYPALPGLALMFAGTWLLAYAGGYQIYGAGILWTVGLISLGGILADYMAGMLGVKYTGAGKLAVRGALAGSIIGIFFSLPGLILGPFIGAAAGELIDRRNMLQAGKAGLGTLLGLVVGTAFKIGCAVSILFILLVKYIAYLF

SEQ ID NO: 3433 - protein, 162 aa, Neisseria; identical to SEQ ID NO: 1503

SEQ ID NO: 3434 - protein, 162 aa, Neisseria
MTALLVILALALIAAGTAGIVYPALPGLALMFAGTWLLAYSGGYQIYGAGVLWTVGLISLAGILADYVAGIWGTKYTGAGKLAVRGALAGSIIGIFFSLPGLILGPFIGAAAGELIERRNMLQAGKAGLGTLLGLIVGTAFKIGCAVSILFILLVKYIAYLF

SEQ ID NO: 3435 - protein, 110 aa, Neisseria
MAETMKKQADSPDLVYGLEDRPPFGNALLSAVTHLLAIFVPMITPALIVGGALELPVEMTAYLVSMAMVASGVGTYLQVNRFGSVGSGMLSIQRYRHDCARRGDERGRFE

SEQ ID NO: 3436 - protein, 463 aa, Neisseria; identical to SEQ ID NO: 1501

SEQ ID NO: 3437 - protein, 463 aa, Neisseria; identical to SEQ ID NO: 1501

SEQ ID NO: 3438 - protein, 262 aa, Neisseria
  VARIANT (1)...(262): Xaa = Any Amino Acid
MPFPVFRQXFAXSLLRFFAVGRILESDISNSGFSETINASNVFFVGYEYPACISNLHRFQFRKLGIQFFHALFAEVDGQSGGFAFVCGIDNHAGAEFGVTDVLSDAEACVGLRLFEVIDDFVPLYGGLARVAVAVEGGFFDGQVVQYFWRDFFDEAGCDAELGLSVQHALLCHGDVEAFAGAGDGDVHEAAFFFEAAALGKAHFAGETPLFHTGEEDGVEFQAFGGVDGHQLDGFFACPCLVFAGFEGGVAQEGEDGEGGIV

SEQ ID NO: 3439 - protein, 261 aa, Neisseria
  VARIANT (1)...(261): Xaa = Any Amino Acid
MPFPVFRRPFALSLLTFFAVSQILVSDISNSGVSETIDASNVFVGYEYPTYISNLHLFQFRKLGVQLFHALFAEIDGQSGGFAFICGIDNHAGAEFGVADVLSDTETCVGLGLFVVVDDFIFGCGGLARVAVTVVGRLFDGQVVQYFGWDLFDEAGDDAELGLSVQHALLRHGDVEAFAGAGDGDVHEAAFFFEAAAFGKAHFAGEAAFFHAGEEDGVKFQAFGGVDGHELDGLFACACLVFTGFEGGIAXEGENGEGGVV

SEQ ID NO: 3440 - protein, 255 aa, Neisseria
FRRPFALSLLQFFAIGRILESDISNSGFSETIDASNIFVGYEYPACISNLHRFQFRKLGVQLFHALFAEIDGQSGGFAFICGIDNHAGAEFGVADVLSDTETCVGLGLFVVVDDFVFGRGGLARVAIAVVGGFFDGQVVQYFGRDFFDEAGDDAELGLSVQHALLRHGDVEAFAGAGDGDVHQAAFFFEAAAFGKAHFAGEAAFFHAGEEYGVKFQAFGGVHGHELYGFFARACLVFAGFESSIAESEDGEGGVV

SEQ ID NO: 3441 - protein, 426 aa, Neisseria
MKSLFIWLLLLGSAAGVFYHTQNQSLPAGELVYPSAPQIRDGGDALHYLNRIRTQIGLHALAHAPVLENSARRHARYLTLNPEDGHGEHHPDNPHYTAQKLTERTRLAGYLYNGVHENISTEEEAAESSDSDIRTQQRQVDALMSAIYHRLSLLDRHTDEAGAAFVRENGKTVLVFNQGNGSFERACAKGRRQPEAGRKYYRNACHNGAAVYADEAMPVTELLYTAYPVGGGALPYFYGERPDPVPEYEITGNPASIDFSEAAGKIAMKSFKLYQGKNEIRPVRVLTAGNDPNGRLTAHQFALFPLKPLEYGTLYTAVFDYVRNGRHAQAKWQFRTRKPDYPYFEVNGGETLAVRKGEKYFIHWRGRWCLEACTRYTYRRQFGNSLSILRHEAGGIVFSVSGMAGSRIRLTPEDSPERGVTLYLQD

SEQ ID NO: 3442 - protein, 164 aa, Neisseria
  VARIANT (1)...(164): Xaa = Any Amino Acid
MKSLFIRLLLLGSAAGVFYHTQXQSLPAGELVYPSAPQIRDGGDALHYLNRIRAQIGLHKLAHAPVLENSARRHASYLTLNPEDGHGEHHPDNPHYTAQKLTERTRLAGYLYNGVHENISTEEEAAESSDSDIRTQQRQVDGLMSAIYHRLSLLDRHTDESGAA

SEQ ID NO: 3443 - protein, 426 aa, Neisseria
MKSLFIRLLLLGSAAGVFYHTQNQSLPAGELVYPSAPQIRDGGDALHYLNRIRAQIGLHKLAHAPVLENSARRHARYLTLNPEDGHGEHHPDNPHYTAQKLTERTRLAGYLYNGVHENISTEEEAAESSDSDIRTQQRQVDGLMSAIYHRLSLLDRHTDEAGAAFVRENGKTVLVFNQGNGRFERHCAQGRNQPEAGRKYYRNACHNGAVVYTDEAMPAQELLYTAYPVGNGALPYFHGERPDPVPEYEITGNPASIDFSEAAGKITMKSFKLYQGKNEIRPVRVLTAGNDPNGRLTAYQFALFPLKPLEYGTLYTAVFDYVRNGRRAQAKWQFRTRKPDYPYFEVNGGETLAVRKGEKYFIHWRGRWCLEACTRYTYRQRPGSRLSIGRHKAGGIVFSVDGMAGSRITLAPEGETERGVTLYLQD

SEQ ID NO: 3444 - protein, 392 aa, Neisseria
MSGRTGRNSATQAQPERVMLVGVMLDKDDTGSNAARLNGFQTALAEAVELVKAAGGDSVRVETAKRDRPHTALFVGTGKAAELSEAVAADGIDLVVFNHELTPTQERNLEKILQCRVLDRVGLILAIFARRARTQEGRLQVELAQLSHLAGRLIRGYGHLQSQRGGIGMKGPGETKLETDRRLTAHRINALKKQLANLKKQRALRRKSRESGRIKTFALVGYTNVGKSSLFNRLTKSGIYAKDQLFATLDTTARRLYISPACSIILTDTVGFVSDLPHKLISAFSATLEETVQADVLLHVVDAAARNSGQQIEDVENVLQEIHAHDIPCIKVYNKTDLLPSEEQNTGIWRDAAGKIAAVRISVAENTGIDALREAIAEYCAAAPNTDETEMP

SEQ ID NO: 3445 - protein, 379 aa, Neisseria
  VARIANT (1)...(379): Xaa = Any Amino Acid
MTGRTGGNGSTQAQPERVMLVGVMLDKDGTGSSAARLNGFQTALAEAVELVKAAGGDSVRVETAKRDRPHTALFVGTGKAAELSEAVAADGIDLVVFNHELTPTQERNLEKELKCRVLDRVGLILAIFARRARTQEGRLQVELAQLSHLAGRLIRGYGHLQSQRGGIGMKGPGETKLETDRRLIAHRINALIKQLANLKKQRALRRKSRESGTIKTFALVGYTNVGKSSLFNRLTKSGIYAKDKLSPECSIILTDTVGFVSDLPHKLISAFSXTLEETAQADVLLHVVDAAAPNSGQQIEDVENVLQEIHAGDIPCIKVYNKTDLLPSEEQNTGIWRDAAGKIAAVRISVAENTGIDALREAIAESCAAAPNTDETEMP

SEQ ID NO: 3446 - protein, 392 aa, Neisseria
MTGRTGRNGSTQAQPERVMLVGVMLDKDGTGSSATRLNGFQTALAEAVELVKAAGGDSVRVETAKRDRPHTALFVGTGKAAELSEAVAADGIDLVVFNHELTPTQERNLEKILQCRVLDRVGLILAIFARRARTQEGRLQVELAQLSHLAGRLIRGYGHLQSQRGGIGMKGPGETKLETDRRLIAHRINALKKQLANLKKQRALRRKSRESGTIKTFALVGYTNVGKSSLFNRLTKSGIYAKDQLFATLDTTARRLYISPECSIILTDTVGFVSDLPHKLISAFSATLEETAQADVLLHVVDAAAPNSGQQIEDVENVLQEIHAGDIPCIKVYNKTDLLPSEEQNTGIWRDAAGKIAAVRISVAENTGIDALREAIAEYCAAAPNTDETEMP

SEQ ID NO: 3447 - protein, 382 aa, Neisseria; identical to SEQ ID NO: 73

SEQ ID NO: 3448 - protein, 344 aa, Neisseria
  VARIANT (1)...(344): Xaa = Any Amino Acid
MEDLQEIGFDVAAVKVGRQREHHRLHHPQPGNGEADDVLFAFFLVGGFDFLRVIGCGGVAYLPDFQQNVGKADFAVVPDDAAAVRAVIEVDADDAVCTQKLLFDQPDAGGAGDAAEHNRLARAAVGFHKVGLDFGQVVQADLVEDFLGRQLGFLRVGGALFVITAQARVNNALCDRLTAGAQGFAVFVFVTDSQVEVFGNIQTAVETGFFHGISVSSVFGAAAQDSAMASRSASIPVFSATEMRTAAIFPAASRHMPVFCSSDGSRSVLLYTLMHGISPAWISCSTFSTSSICCPLFGAAASTTCSSTSACAVSSSVAXKAEISLCGRSLTNPTVSVRIMLHSG

SEQ ID NO: 3449 - protein, 381 aa, Neisseria; identical to SEQ ID NO: 72

SEQ ID NO: 3450 - protein, 148 aa, Neisseria
MPPSRRGNGVFYQNGKLANAVSACRLPNRQTFPVPVPNPMPSEPSDGIGCLFVHSDGCRFVLCRFVAVIQHAEFDGDASLRFAVGVGIAQGIRAAAVFLLVEVFAFADFNHTRAAAAFAPVEVPIGHIIVRRGGTVSAVVDLRHIFPA

SEQ ID NO: 3451 - protein, 111 aa, Neisseria
PNPMPSEPSDGIGCLFVHPDGGRFVLCRFVAVIQHAEFDGDSALFAVGIGIPQGIGTTAIFLLVEVFTFADFNHARAAAAFAPVEIPIHHIIVRRGGAVSAVVDLRHIFPA

SEQ ID NO: 3452 - protein, 145 aa, Neisseria
MPSSRRGNGVFYQNGKLANAVSDCRLPNRQTFPVPMPNPMPSEPSDGIGCLFVHPDGCRFVLCRFVAVIQHAEFDGDSALFAVGVGIPQGIGTTAIFLLVEFTFADFNHTRAAAAFAPVEIPIHHIIVRRGGAAAAVVNLVHVFP

SEQ ID NO: 3453 - protein, 111 aa, Neisseria
MPKWSRIRRCSVLSLMFSAAVSRLTWCAPPSNAAFRVRLKSSDGIASASAVCPAAGSMPSETVSHKSDSSRNTSASRRNVSPKCPFGTVCRQDAAKPRRFGGKSHILTGSR

SEQ ID NO: 3454 - protein, 121 aa, Neisseria
MPKWSRIRRCSVLSLMFSASVSRLTWCAPSANAAFRVRLKSSDGIASASAVCPAAGPMPSETVSHKSDSSRNTSASRAMFRPNAPLGRNVSPKCPFGTAFRQDAAKPRRFGGKSHILTGSR

SEQ ID NO: 3455 - protein, 110 aa, Neisseria
MPKWSRIRRCSVLSLMFSVSASRLTCAPPANAAFRMRLKSSDGIASASAVCPAAGPMPSETVSHKSDSSRNTSASRRNVSPKCPFGTAFRQDAAKPRRFGGKSHILTGSR

SEQ ID NO: 3456 - protein, 376 aa, Neisseria
MVCRLFAAVFGFQLGNQPVDAFGFDDFAELVAVHGNQARAFDGDVVGTVFAAALVGGKVHIDGLLTGDADFGTDDDFLAALIDDGIVFDVDGRVFEFQHRAGIGADQQGLKFFGQRLFLRVGRGTPRVADRQCGHTLEIEIGNRIGFGFWACRSRVAAFEDGQNLCGVLADLSHCVGRGGKCHADAQNTDAQCADEGGFFHDVFPENGCVCLFCGFFRIAALSVFLGEAGHEFTDQVFQNHCRTGYGDGVAGSKVFRIAALLQPDVLFAQKSRSQDLRGNVTAELILAVQIKAHPRLIGFRVKPDSADAPDQYACGFDGGIDLQTADVAEIGINGVSFVRTAERRAARHAESEKGNRRRADQDEQSDPKFQYVLFH

SEQ ID NO: 3457 - protein, 378 aa, Neisseria
  VARIANT (1)...(378): Xaa = Any Amino Acid
MVCRLFAAVFGFQLGNQSVHAFRFDNFAELVAVHGNQARAFDGDVVGTVFTAALVGGEVHVDGFLPGYADFGADDDFFAAFIDDGIVFDVDVGVFXFQHRAGIGADQQGLKFFGQRLFLRVGRGAPRVADRQCGHTLEIEIGNRIGFGFLASGVGIAVFXDAQYLSGVLTDLAYRVGRGGKCHADAQNTDAQCADEGGFFHDXVSXFEYDGIRLFGGFFRIAAVGIFLGKTRHEFADKVFQNHCRTGYGDGVAGSKVFRVAALLQPDVLLAQKSRSQDLRGNVAAELILAVQIEAHPRLIGFRVKSDSADAPDQYACGFDGGIDLQTADVAEIGINGVSFVRTAERRTAGHAESEKGNRRRANQDEQSDPKFQYVLLH

SEQ ID NO: 3458 - protein, 374 aa, Neisseria
  VARIANT (1)...(374): Xaa = Any Amino Acid
MAYGLLAAVXSLQLXNQSVHAFRFDNFAELVAVHGNQARAFDGDVVGTVFTAALVGGEVHVDGFLPGXADFGADDDFFAAFIDDXIVFDVDVGVFFQHRAGIGADQQGLKFFGQRLFLRVGRGAPRVADRQCGHTLEIEIGNRIGFGFLAGGVGITAFDAQYLSGVLTDLVYRVGRGGKCHADAQNTDAQCADEGGFFHDVSFEYDGIRLFGGFFRIAAVGIFLGKTRHEFADKVFQNHCRTGYGDGVAGSKVFRVAALLQPDVLLAQKSRSQDLRGNVAAELILAVQIEAHPRLIGFRVKSDSADAPDQYACGFDGGIDLQTADVAEIGINGVSFVRTAERRTAGHAESEKGNRRRANQDEQSDPKFQYVLFH

SEQ ID NO: 3459 - protein, 162 aa, Neisseria
MKKILTAAAVALIGILLATVLIPDSKTAPAFSLPDLHGKTVSNADLQGKVTLINFWFPSCPGCVSEMPKVTKTANDYKNKDFQVLAVAQPIDPIESVRQYVKDYGLPFTVIYDADKAVGQAFGTQVYPTSVLIGKKGEILKTYVGEPDFGKLYQEIDTALAQ

SEQ ID NO: 3460 - protein, 161 aa, Neisseria
  VARIANT (1)...(161): Xaa = Any Amino Acid
MXKILTAAVVALIGILLAIVLXPDSKTAPAFSXPDLHGKTVSNADLQGKVTLINFWFPSCPGCVSXMPKIIKTANDYKXKNFQVLAVAQPIDPIESVRQYVKDYGLPFTVMYDADKAVGQAFGTQVYPTSVLIGKGEIFKTYVGEPDFGKLYQEIDTRVAQ

SEQ ID NO: 3461 - protein, 162 aa, Neisseria
  VARIANT (1)...(162): Xaa = Any Amino Acid
MKKILTAAVVALIGILLAIVLIPDSKTAPAFSLSXLHGKXVXNADLQGXVXLIXFWFPSCPGCVSEMXXIIKTANDYKNKNFQVLAVAQPIDPIESVRQYVKDYGLPFTVMYDADKAVGQAFGTQVYPTSVLIGKKGEILKTYVGEPDFGKLYQEIDTALAQ

SEQ ID NO: 3462 - protein, 141 aa, Neisseria
MFVDNGFNKTVASFAQIVETFDVFFFRNDCAFFTQMKQRCGWVCSLVYLVDIFTRCGFEIPNRSFKELGLLIQISLSERFRTNAEVEMDAHYFPLLRKYLKFIMLHIVTNIRVFCVCVKELLTILVKNLSPNGKKRFVFCC

SEQ ID NO: 3463 - protein, 142 aa, Neisseria
  VARIANT (1)...(142): Xaa = Any Amino Acid
MFVDNGFNKTVASFAQIVETFDVFFFRNDCAFFTQMKQRCGWVCSLVYLVDIFPRCGFEIPNRSFKELGLLIQISLSERFRTNAEVEMDAHYFPLLRKYLKFIMLHIFTNIKVFXCVCVKELLTILVKNLSPNGKKRFVFCC

SEQ ID NO: 3464 - protein, 127 aa, Neisseria
  VARIANT (1)...(127): Xaa = Any Amino Acid
MFVDNGFNKTVASFAQIVETFDVFFFRNNCTFFTQMKQRCGWVCSLVYLVDIFPRCGFEIPNRSFKELGLLIQISLSERFRTNAEVEIDAHYFPLLRKYLKFIMLHIFTNIKVFXCVCVKELLTILV

SEQ ID NO: 3465 - protein, 232 aa, Neisseria
NEISSIAGNRRHEAEMFSVPRSFLPGVFVLAALAACKPQDNSAAQAASSSASAPAAENAAKPQTRGTDMRKEDIGGDFTLTDGEGKPFSLSDLKGKVVILSFGFTHCPDVCPTGLLTYSDTLKQLGGQAKDVKVVFVSIDPERDTPEIIGKYAKQFNPDFIGLTATGGQNLPVIKQQYRVVSAKINQKDDSENYLVDHSSGAYLIDKNGEVAIFSPYGSEPETIAADVRTLL

SEQ ID NO: 3466 - protein, 217 aa, Neisseria
  VARIANT (1)...(217): Xaa = Any Amino Acid
MFSVPRSFLPGVFVLAALAACKPQDNSAAQVASSSASASAAENAAKQXTRGTDMRKEDIGGDFTLTDGEGKPFNLSDLKGKVVILSFGFTHCPDVCPTELLTYSDTLKQLGGQAKDVKVVFVSIDPERDTPEIIGKYAKQFNPDFIXLTATGGQNLPVIKQQYRVVSAKVNQXDDSENYLVDHSSGAYLIDKNGEVAIFSPYGSEPETIAADVRTLL

SEQ ID NO: 3467 - protein, 217 aa, Neisseria
MFSVPRSFLPGVFVLAALAACKPQDNSAAQVASSSASASAAENAAKPQTRGTDMRKEDIGGDFTLTDGEGKPFNLSDLKGKVVILSFGFTHCPDVCPTELLTYSDTLKQLGGQAKDVKVVFVSIDPERDTPEIIGKYAKQFNPDFIGLTATGDQNLPVIKQQYRVVSAKVNQKDDSENYLVDHSSGAYLIDKNGEVAIFSPYGSEPETIAADVRTLL

SEQ ID NO: 3468 - protein, 314 aa, Neisseria
MITDRFHLFHFPVSFIYQSDNKMPPENSSDGILTTNGLQLPFAQLGSVSFQICNRTGCHAAFHRCFGGSRSDARQQAGIERSRNQVFRAEFEFLTVSGNHFFGYFFHRQICQSIHAGAFHFFVDGGCADIQRAPEDEREAQYVVHLVREVGAAGTDNHVRTGFFRQRRQDFRIRVGHGEHDGFFVHRVQHFRRQQVCAGEAQEDVFAFNRIGKYAPAVVFNGVEFFGFVHAVFVFAGLVNHAFGVANGYVFTFQAQIQQLVQAGNRGGTCAGAHQSRFFDFTAGITQGVQYGGGGNDGRAVLVIMKYGDFAAFA

SEQ ID NO: 3469 - protein, 106 aa, Neisseria
  VARIANT (1)...(106): Xaa = Any Amino Acid
DGIGKHALAVVFNGVELFGLVHTVFVFAGLVNHAFGVANGHVFAFQAQIQQLXQAGNRGRTCAGTHQSRFFDFTAGKTXGVQYGGGGNDGRAVLVVVEYGDFAAFA

SEQ ID NO: 3470 - protein, 299 aa, Neisseria
LYQSDSKMPPENSSDGILTANGLQLPFAQLGSVSFQICNRTGCHAAFHRCFGGSRSNARQQAGIERSRNQVFRAEFKFLTVSGNHFFGYLFHRQIRQSIHAGAFHFFVDGRRADIQRTAEDEREAQYIVHLVREVGAAGTDNHVRTGFFRQRRQDFRIRVGHSEHDGFFVHGVQYFRRQQVRAGEAQEDVFAFDGIGKHALAVVFNGVELFGLVHTVFVFAGLVNHAFGVANGHVFAFQAQIQQLVQAGNRGRTCAGTHQSRFFDFTAGKTQGVQYGSGGNDGRAVLVVVEYGDFAAFA

SEQ ID NO: 3471 - protein, 177 aa, Neisseria
MKLKTLLLPFAALALCANAFAAPPGDASLARWLDTQNFDRDIEKNMIEGFNAGFKPYADKALAEMPEAKKDQAAEAFNRYRENVLKDLITPEVKQAVRNTLLKNAREIYTQEEIDGMIAFYGSPVGQSVVAKNPRLIKKSMSEIAVSWTALSGKIARHHLPEFTEELRRIICGGIVD

SEQ ID NO: 3472 - protein, 193 aa, Neisseria
IKLKTLLLPFATLALCTNAFAAPPSDASLARWLDTQNFDRDIEKNMIEGFNAGFKPYADKALAEMPEAKKDQAAEAFNRYRENVLKDLITPEVKQAVRNTLLKNAREIYTQEEIDGMIAFYGSPVGQSVVAKNPRLIKKSMSEIAVSWTALSGKIAQHHLPEFTEELRRIICGGKNPDAGCKQAGQVGKRHQK

SEQ ID NO: 3473 - protein, 193 aa, Neisseria; identical to SEQ ID NO: 3472

SEQ ID NO: 3474 - protein, 195 aa, Neisseria
LNIKLKTLLLPFATLALCTNAFAAPPSDASLARWLDTQNFDRDIEKNMIEGFNAGFKPYADKALAEMPEAKKDQAAEAFNRYRENVLKDLITPEVKQAVRNTLLKNAREIYTQEEIDGMIAFYGSPVGQSVVAKNPRLIKKSMSEIAVSWTALSGKIAQHHLPEFTEELRRIICGGKNPDAGCKQAGQVGKRHQK

SEQ ID NO: 3475 - protein, 195 aa, Neisseria; identical to SEQ ID NO: 3474

SEQ ID NO: 3476 - protein, 263 aa, Neisseria
MDYLQNLSLGLTKKLPVILQTEVAECGLACLAAVAGFYGFYTDLRALRSKYCLSLKGENLADIVRFADDMGLTGRALRLDLDELGSLRLPCILHWDLNHFVVLESVSSDGAAVMDPASGRRKVKTEEISRKFTGIALELWPNTRFEAGEEKQEIRILPMLRGISGLGRTLFQLLALAAAMEVFAFLQNVSFKIGRGESLALIGRSGCGKSTLLDILSGNLPPESGKVMINGHDIYSLPPPFIPQFECDGQGRTMFYSGLNLNR

SEQ ID NO: 3477 - protein, 185 aa, Neisseria
  VARIANT (1)...(185): Xaa = Any Amino Acid
MDYLSRLSFGFNKKLPVILQTEVAECGLACLTSILSYYGFHTDLRTLRQKYTLSLKGANLADIMRFGNEMNLTPRALRLELDELSNLQLPCILHWNLNHFVVLCSISKDSIVIMDPAVGMRKIKMDEVSQKFTGIALELFPNTHFEEKKETKKIKILSLLRGXSGLKRSLIQMLILAISLEVFAL

SEQ ID NO: 3478 - protein, 51 aa, Neisseria
MPHLQNLSLGLKKKLPVILQTEISECGLACLAAVAGFHGFHTNLRALRSKY

SEQ ID NO: 3479 - protein, 389 aa, Neisseria
MTAHKILPVLLPIILGVSHATAASPAPNRPTVHAAPTLQTPETLTAAHIVIDLQSRQTLSAKNTNTPVEPAALTQLMTAYLVFKNMKSGNIQSEENLKIPESAWASEGSRMFVRPGDTVSTDKLLKGMIALCANDAALTLADRLGNGSIENFVQQMNKEARRLGMKNTVFKNPTGLGREGQVSTAKDLSLLSEALMRDFPEYYPLFSIKSFKFENIEQNNRNILLYRDNNVNGLKAGHTESGGYNLAVSYSGNGRHILVITLGSESAETRASDNSKLLNRALQAFDTPKIYPKGKTVAQIQISGGSKKTVRAGFLKEAYITLPHKEAKMAEQILETIQPIPAPVKKGQILGKIKIRQNGHTIAEKEIVALENVEKRSRWQRLWTRLTGQ

SEQ ID NO: 3480 - protein, 389 aa, Neisseria; identical to SEQ ID NO: 1450

SEQ ID NO: 3481 - protein, 389 aa, Neisseria
MTAHKILPVLLSIILGVSHATAASPAPNRPTAHAAPTFQTPETLTAAHIVIDLQSKQILSAKNINTPVEPAALTQLMTAYLVFKNMKSGNIRSEENLKIPESAWASEGSRMFVRPGDTVSTDKLLKGMIALSANDAALTLAGRLGNGSIENFVQQMNKEARRLGMKNTVFKNPTGLSREGQVSTAKDLAQLSEALMRDFPEYYPLFSIKSFKFKNIEQNNRNILLYRDNNVNGLKAGHTESGGYNLAVSYSGNGRHILVITLGSESAETRASDNSKLLNWALQAFDTPKIYPKGKTVAQIQISGGSKKTVRAGFLKEAYITLPHKEAKMAEQILETIQPIPAPVKKGQILGKIKIRQNGYTIAEKEIVALENVKKRSRWQRLWACLTGQ

SEQ ID NO: 3482 - protein, 139 aa, Neisseria; identical to SEQ ID NO: 1284

SEQ ID NO: 3483 - protein, 139 aa, Neisseria; identical to SEQ ID NO: 1284

SEQ ID NO: 3484 - protein, 139 aa, Neisseria; identical to SEQ ID NO: 1284

SEQ ID NO: 3485 - protein, 159 aa, Neisseria
MNKIFLTAAALVLGACGFHLKGADGISPPLTYRSWHIEGGQALQFPLETALYQASGRVDDAAGAQMTLRIDSVSQNKETYTVTRAAVINEYLLILTVEAQVLKRGEPVGKPMTVSVRRILDYADNEILGKQEEEETLWAEMRQDVAEQIVRRLTFLKAE

SEQ ID NO: 3486 - protein, 159 aa, Neisseria; identical to SEQ ID NO: 1282

SEQ ID NO: 3487 - protein, 159 aa, Neisseria
MNKLFLTAAVLMLGACGFHLKGADGISPPLTYRSWHIEGGQALQFPLETALYQASGRVDDAAGAQMTLRIDSVSQNKETYTVTRAAVINEYLLILTVEAQVLKRGEPVGKPMTVSVRRVLAYADNEILGKQEEEAALWAEMRQDAAEQIVRRLTFLKAE

SEQ ID NO: 3488 - protein, 106 aa, Neisseria
MDACFFVIPAQAGIRRFGIVFKRSGRILAGAGMMPLYTFSELYMLQQGTAHQAPHCVLPERGCPPIRFYRYKQTGFNRKGMGIKSISDTSRAMPSENQSPLSDGIV

SEQ ID NO: 3489 - protein, 106 aa, Neisseria
  VARIANT (1)...(106): Xaa = Any Amino Acid
MNACFFVIPTQAGIRRFGIVFKRSGRILAGAGMMPLYTFSELYMFQQGTAHQAPHCVLPERDYPPIRFYRHKQTGFNRKGMGIKSISDIXRAMPSENQSPLSDGIV

SEQ ID NO: 3490 - protein, 138 aa, Neisseria
MNACFFVIPTQAGIRRFGIVFKRSGRILAGAGMMPLYIVDIIRTRRRSRRQYKYGKARQRRTGLNLIHYTFSELYMFQQRTAHQAPHCVLPERDCPPIRFYRYKQTGFNRKGMGMKSVSDTSRAMPSENQSPLSDGIV

SEQ ID NO: 3491 - protein, 246 aa, Neisseria
MLIIRNLIYWLILCSSLIFLFPFMLLASPFRDGAHKMARVWVGILNWSLKHIVGLKYRIIGAEHIPDRPSVICAKHQSGWETLALQEIFPPQVYVAKRELFKIPFFGWGLKLVKTIGIDRNNRREANEQLIKQGLARKNEGYWITIFPEGTRLAPGKRGKYKLGGARMAKMFEMDIVPVALNSGEFWPKNSFLKYPGEITVIICPTIPHASGSEAELMEKCEHLIETQQPLISGAGPFAAEMPSET

SEQ ID NO: 3492 - protein, 247 aa, Neisseria; identical to SEQ ID NO: 2549

SEQ ID NO: 3493 - protein, 247 aa, Neisseria
MLIIRNLIYWLILCSTLIFLFPFMLLASPFRDGAHKMARVWVKILNLSLKHIVGLKYRIIGAENIPDRPAVICAKHQSGWETLALQDIFPPQVYVAKRELFKIPFFGWGLKLVKTIGIDRNNRREANEQLIKQGLARKNEGYWITIFPEGTRLAPGKRGKYKLGGARMAKMFEMDIVPVALNSGEFWPKNSFLKYPGEITVVICPTIPHASGSEAELMGKCEHLIETQQPLISGAGPFAAKMPSETA

SEQ ID NO: 3494 - protein, 590 aa, Neisseria; identical to SEQ ID NO: 1802

SEQ ID NO: 3495 - protein, 590 aa, Neisseria
MILPARFSDGISLSLRLKLLTGLWVGLAALSVVLTLLLSLRLENAASVIEEAGNLRMQAYRLAYMAGEGSPRAQIDNQVAEFEKSLKRIAQSDAIHPLIPSDTPLAYDLIQSMLIIDWQAHILPPLQSYRRPTQVDLYRFAGNIELFLQALENANEKNTWWLRRFQWAIMLMTLVSSVLMLFWHQIWVIRPLQALREGAERIGRRCFDIPVPEGGTPEFKQVGRCFNQMGGRLKILYDDLEGQVAEQTRSLEKQNQNLTLLYQTTRDLHQSYIPQQAAEHFLNRILPAVGADSGRVCLDGGSDVYVSIHHADCGTAASDLGKYHEEIFPIEYQNETLGRLLLSFPNGISLDEDDRILLQTLGRQLGVSLAGAKQEEEKRLLAVLQERNLIAQGLHDSIAQALTFLNLQVQMLETAFAENKREEAAENIGFIKTGVQECYEDVRELLLNFRTKISNKEFPEAVADLFSRFTQQTGTTVETAWENGTHLPTQDEQLQMIFILQESLSNIRKHAHATHIKFRLLKQDGSFTMTIQDNGQGFDTENIGEPSGSHVGLHIMQERAKRIHAVLEIRSQAQQGTTVSLTVASEESLK

SEQ ID NO: 3496 - protein, 208 aa, Neisseria
MASPSSLPFNSGKTKPTAFAAPVLVGIMFSTPLRARRRSLWRTSVTVWSLVSAWMVVIAPLTMPTLSLNTLATGERQLVVQEALETTVMSAVRTLSFTPYTTVASTSSPPGAEMRTFFAPLSRWILAFSLLVNAPVHSMTKSTPSSFHGSSAGLRVEKKGILSPLTMRLPPSWDTSASKRPCTVSNLVRWALVSRLPLALTATIWSWS

SEQ ID NO: 3497 - protein, 208 aa, Neisseria
MASPSSLPFNSGSTKPTAFAAPVLVGIMFSTPLRARRRSLWRTSVTVWSLVSAWMVVIAPLTMPTLSLNTLATGERQLVVQEALETTVMSAVRTLSFTPYTTVASTSSPPGAEMRTFFAPLSRWILAFSLLVNAPVHSMTKSTPSSFHGSSAGLRVEKKGILSPLTMRLPPSWDTSASKRPCTVSNLVRWALVSRLPLALTATSWSWS

SEQ ID NO: 3498 - protein, 207 aa, Neisseria
  VARIANT (1)...(207): Xaa = Any Amino Acid
MASPSSLSFNSGSTKPTAFAAPVLVGIMFSTPLRARRRSLWRTSVTVWSLVSAWMVVIAPLTMPTLSLNTLATGERQLVVQEALETTVMSAVRMLSFTPYTTVASTSSPPGAEMRTFFAPLSRTLAFSLLVNAPVHSMTKSTPSSFHGSSAGLRVXKXGILSPLTMRLPPSWDTSASKRPCTVSNLVRWALVSRLPLALTATIWSWS

SEQ ID NO: 3499 - protein, 2048 aa, Neisseria
  VARIANT (1)...(2048): Xaa = Any Amino Acid
MNKTLYRVIFNRKRGAVVAVAETTKREGKSCADSGSGSVYVKSVSFIPTHSKAFCFSALGFSLCLALGTVNIAFADGIITDKAAPKTQQATILQTGNGIPQVNIQTPTSAGVSVNQYAQFDVGNRGAILNNSRSNTQTQLGGWIQGNPWLTRGEARVVVNQINSSHPSQLNGYIEVGGRRAEVVIANPAGIAVNGGGFINASRATLTTGQPQYQAGDFSGFKIRQGNAVIAGHGLDARDTDFTRILLYANKITLISTAEQAGIRNQGQLFASSGNVAIDANGRLVNSGTMAAANVQDMNNTAEHKVNIRSQAFENSGTAVSQQGTQIHSQSIQNTGKLLSAGTEDLAVSGSLNNQNGEIATNQQLIIHDGQQSTVVIDNTNGTIQSGRDVAIQAKSLSNNGTLAADNKLDIALQDDFYVERKIVAGNELSLSTRGSLKNSHTLQAGKRIRIKANNLDNAVQGNIQSGGTTDIGTQHNLTNRGLIDGQQTKIQAGQMNNIGTGRIYGDNIAIAATRLDNQDENGTGAAIAARENLNLGIEQLNNRENSLIYSGNDMAVGGALDTNDQATGKAQRIHNAGAIIEAAGKMRLGVEKLHNTNEHLKTQLVETGRERIVDYEAFGRHELLREGTQHELGWFVYNNESDHLRTPDGVAHENWHKYDYEKVTQETQVTGTAPAKIIAGSDLIIDSKAVFNSDSRIIAGGQLLVQTEKDGLHNEQTFGEKKVFSENGKLHNYWRARRKGHDETGHREQNYTLPEEITRDISLGSFAYESHSKALSRHAPSQGTELPQSNRDNIRTAKSNGISLPYTPNSFTPLPGSSLYIINPANKGYLVETDPRFANYRQWLGSDYMLGSLKLDPNNLHKRLGDGYYEQRLINEQIAELTGHRRLDGYQNDEEQFKALMDNGATAARSMNLSVGIALSAEQAAQLTSDIVWLVQKEVKLPDGGTQTVLMPQVYVRVKNGGIDGKGALLSGSNTQINVSGSLKNSGTIAGRNALIINTDTLDNIGGRIHAQKSAVTATQDINNIGGILSAEQTLLLNAGNNINNQSTAKSSQNAQGSSTYLDRMAGIYITGKEKGVLAAQAGKDINIIAGQISNQSDQGQTRLQAGRDINLDTVQTGKYQEIHFDADNHTIRGSTNEVGSSIQTKGDVTLLSGNNLNAKAAEVGSAKGTLAVYAKNDITISSGIHAGQVDDASKHTGRSGGGNKLVITDKAQSHHETAQSSTFEGKQVVLQAGNDANILGSNVISDNGTRIQAGNHVRIGTTQTQSQSETYHQTQKSGLMSAGIGFTIGSKTNTQENQSQSNEHTGSTVGSLKGDTTIVASKHYEQTGSNVSSPEGNNLISTQSMDIGAAQNQLNSKTTQTYEQKGLTVGIQFARYRFGTTSDCRSTQSSKQVGQSKNDRVNAMAAANAGWQAYQTGKGAQNLANGTTNAKQVSISITYGEQQNRQTTQVQANQAQASQIQAGGKTTLYCRRCGEQSNINITGSGVSGRAGTGLIADKQIHLQSAEQSNTERSQNKSAGWNAGAAVSFGQGGWSLGVAAGGNVGKGYGYGDSVTHRHSHIGDKGSQTLIQSGGDTIIKGAQVRGKGVQVNAKNLSIQSVQDRETYQSKQQNAGAQVTVGYGFSASGDYSQSKIRADHASVTEQSGIYAGEDGYQIKVGNHTGLKGGIITSSQSAKDKGKNRFSTGTLAGSDIQNYSQYEGKSFGLGASVAVSGKTLGQGAKNKPQDKHLTSIADKNGASSSVGYGSDSDSQSSITKSGINTPKNIQITDEAAQIRLTGKIAAQTKADIDTNVTTDTAERHSGSLKNIFDKDRVQSELDLQRTVSQDFSKNVQQTNTEINQHLDKLKADKEAAETAAAEALANGDMETAKRKAHEAQDAAAKADNWQQGKVILNMLASGLAEPTQSGAGIAAATASPDVSYAIGQHFKDLAGQNANGKLTASQETAHVLAHAVLGAAVAAAXGNNAPAGALGAGGSEAAAPIIGKWLYGKGDGGSLNAEEKETVSAITRMLGTAAGAAEGNSSADAVWGCFQTASDFASSFSYPINM

SEQ ID NO: 3500 - protein, 2514 aa, Neisseria; identical to SEQ ID NO: 2293

SEQ ID NO: 3501 - protein, 2599 aa, Neisseria
MNRTLYKVVFNKHRNCMIAVAENAKREGKNTADTQAVGILPNDIAGFAGFIHSISVISFSLSLLLGSALILTSSSATAQGIVADKSAPAQQQPTILQTGNGIPQVNIQTPTSAGVSVNQYAQFDVGNRGAILNNSRSNTQTQLGGWIQGNPWLARGEARVVVNQINSSHSSQLNGYIEVGGRRAEVVIANPAGIAVNGGGFINASRATLTTAQPQYQAGDLSGFKIRQGNVVIAGHGLDARDTDYTRILSYHSKIDAPVWGQDVRVVAGQNDVAATGDAHSPILNNAAANTSNNTANNGTHIPLFAIDTGKLGGMYANKITLISTVEQAGIRNQGQWFASAGNVAVNAEGKLVNTGMIAATGENHAVSLHARNVHNSGTVASQDDANIHSQTLDNSGTVLSSGRLTVRNLGRLKNQNNGTIQAARLDMSTGGLDNTGNITQTGSQALDLVSAGKFDNSGKIGVSDVPQTGLNPNPSVIPQIPSTATGSGSSTVSVSKPGSNNPVSPTAPAKNYAVGRIQTTGAFDNAGSINAGGQIDIAAQNGLGNSGSLNAAKLRVSGDSFNNTVKGKLQAHDLAVNTQTAKNSGHLLTQTGKIDNRELHNAGEIAANNLTLIHSGRLSNDKKGNIRAAHLQLDTAGLHNAGNILADSGTVTTKNNLRNTGKVSVARLNTEGQTLDNTRGRIEAETVNIQSQQLTNQSGHITATEQLTINSRNVDNQNGKLLSANQAQLAVSDGLYNQHGEIATNRQLSIHDKNQNTLALNNADGTIQSAGNVSLQAKSLANNGTLTAGNKLDIALTDDFVVERDLTAGKQLNLSIKGRLKNTHTLQAGHTLKLNAGNIDNQVTGKIIGGEQTDITSEQHVDNRGLINSDGLTHIGAGQTLTNTGTGKIYGNHIALDAQILLNREETTEGSTKAGAIAARKRLDIGAKEIHNQEGALLSSEGIFAVGNRLDEQHHAAGMADTFVNGSAGLEVQGDALMSVRNMQNINNHFKTETYLAKAEKQVRDYTVLGQNTYYQAGKDGLFDNSQGQKDQTTATFHLKNGSRIEANQWHVRDYHIETYKERIIENRPAHITVGGDLTASGQNWLNKDSRIVVGGRIITDDLNQKEITNQSTTGKGRTDAVGTQWDSVTKKGWYSGRKRQRRTERNHTPYHDTQLFTHDFDTPVSVIQQNAASPSFQPAASAIKLIDGVSTAAVNGQRIHTGNVVSLNNATVTLPNSSLYTTHPDNKGWLVETDPQFADYRRWLGSDYMLQQLQLDTNHLHKRLGDGYYEQKLVNEQIHQLTGYRRLDGYRSDEEQFKALMDNGLTAAKTFGLTPGIALSAEQVARLTSDIVWMENQTVTLSDGSTQTVLVPKVYALARKGDLNTSGGLISAEQVLLKLQNGNLTNSGTIAGRQAVLIQARNINSNGNIQADQIGLKAEKSINIDGGQVQAGRLLTAQAQNINLNGTTQTSGNERNGNTAIDRMAGINVVGSHTEQVDNRTSDGILSLHASNDINLNAATVSNQVKDGTTQITAGNNLNLGTIRTEHREAYGTLDDENHRHVRQSTEVGSSIRTQNGALLRAGNDLKIRQGELEAEEGKTVLAAGRDVTISEGRQITELDTSVSGKSKGILSSTKTHDRYRFSHDEAVGSNIGGGKMIVAAGQDINVRGSNLISDKGIVLKAGHDIDISTAHNRYTGNEYHESKKSGVMGTGGLGFTIGNRKTTDDTDRTNIVHTGSIIGSLNGDTVTVAGNRYRQTGSTVSSPEGRNTVTAKSIDVEFANNRYATDYAHTQEQKGLTVALNVPVVQAAQNFIQAAQNVGKSKNKRVNAMAAANAAWQSYQATQQMQQFAPSSSAGQGQNNNQSPSISVSITYGEQKSRNEQKRHYTEAAASQIIGKGQTTLAATGSGEQSNINITGSDVIGHAGTALIADNHIRLQSAKQDGSEQSKNKSSGWNAGVAVKIGNGIRFGITAGGNIGKGKEQGGSTTHRHTHVGSTTGKTTIRSGGDTTLKGVQLIGKGIQADTRNLHIESVQDTETYQSKQQNGNVQVTVGYGFSASGSYRQSKVKADHASVTGQSGIYAGEDGYQIKVRDNTDLKGGIITSSQSAEDKGKNLFQTATLTASDIQNHSRYEGRSFGIGGSFDLNGGWDGTVTDKQGRPTDRISPAAGYGSDGDSKNSTTRSGVNTHNIHITDEAGQLARTGRTAKETEARIYTGIDTETADQHSGHLKNSFDKDAVAKEINLQREVTKEFGRNAAQAVAAVADKLGNTQSYERYQEARTLLEAELQNTDSEAEKAAFRASLGQVNAYLAENQSRYDTWKEGGIGRSILHGAAGGLTTGSLGGILAGGGTSLAAPYLDKAAENLGPAGKAAVNALGGAAIGYATGGSGGAVVGANVDWNNRQLHPKEMALADKYAEALKREVEKREGRKISSQEAAMRIRRQILRWVDKGSQDGYTDQSVISLIGMKGEDKALGYTWDYRDYGARNPQTYNDPKLFEEYRRQDKPEYRNLTWLHSGTKDTKIRQGERKNEEFALNVAEGLTSLVNPNPRIKVPILAGIRNLKNIKPTVTGSDPLLAGAGNIRIPANGNVAKGDRIPDTALASKGIKHKDRKDQLEKK

SEQ ID NO: 3502 - protein, 108 aa, Neisseria
MDSTLSKTCCVSCILLSVTTTIFARPRPAASNTSLRFASPNDTGSPALLATCTRAMSKSSAKYGISSLGEDASDRLPAPAEADNQHMIRLAHRFHQHAVQIERLHVPA

SEQ ID NO: 3503 - protein, 209 aa, Neisseria
MDSTLSKTCCVSCILLSVTTTIFARPRPAASNTSLRFASPNDTGSPALLATCTRAMSKSSAKYGISSWARTRPTVCPPLPKPTISTWSDLLMVSTSILCRSSDFMSQLDLTKRPTSASLPPKRKGAIIIDSRTAAVAACSHSGETISSCPAMASITKPNSPPCARYKAVLRLSPTECFILKAMANTTSAFNTSSIANSINTCRQPPINA

SEQ ID NO: 3504 - protein, 209 aa, Neisseria
MDSTLSKTCCVSCILLSVTTTIFARPRPAASNTSLRFASPNDTGSPALLATCTRAMSKSSAKYGISSWARTRPTVCPPLPKPTISTWSDLLMVSTSILCRSSDFMSQLDLTKRPTSASLPPKRKGAIIIDSRTAAVAACSHSSETISSCPAMASITKPNSPPCARYKAVLRLSPTECFILKAMANTTSAFNTSSIANSINTCRQPPINA

SEQ ID NO: 3505 - protein, 116 aa, Neisseria
MPSEQYLFRRHFVWGLTVVQPEYVLHIVQTRFAVYPNCGADGTGGKGHAAAGFVGDFHAFAVGGEEGGVVADYVACADGGKADGGRIARTSVAFAAVNGALFEVAAERAGDDFAHS

SEQ ID NO: 3506 - protein, 116 aa, Neisseria
MPSEQYLFRRHFVWGLTVVQPEYVLHIVQTRFAVDPNCGADGTGGKGHAAAGLVGDFHALAVGGEEGGVVADDVACADGGKADGRRIARTGVAFAAVNGALFEVSAERAGDDFAHA

SEQ ID NO: 3507 - protein, 116 aa, Neisseria
MPSEQYLFRRHFVWGLTVVQPEYVLHIVQTRFTVYPNCGADGAGGKGHAAACLVGDFHALAVGGEEGGVVADDVARADGGKADGGRIARAGVAFAAVNGALFEVSAERAGDDFAHA

SEQ ID NO: 3508 - protein, 213 aa, Neisseria
MRRRAAASTRRVCSPAFIRSYWAMRTCSRRRYAAKRADTACWVRTRALAGAEIELVQEIAREVRLKNALKAVAEDYDFILIDCPPSLTLLTLNGLVAAGGVIVPMLCEYYALEGISDLIATVRKIRQAVNPDLDITGIVRTMYDSRSRLVAEVSEQLRSHFGDLLFETAIPRNIRLAEAPSHGMPVMAYDAQAKGAKAYLALADELAARVSGK

SEQ ID NO: 3509 - protein, 257 aa, Neisseria; identical to SEQ ID NO: 783

SEQ ID NO: 3510 - protein, 257 aa, Neisseria
MSANILAIANQKGGVGKTTTTVNLAASLASRGKRVLVVDLDPQGNATTGSGIDKASLQSGVYQVLLGDADVKSAAVRSKEGGYGVLGANRALAGAEIELVQEIAREVRLKNALKAVAEDYDFILIDCPPSLTLLTLNGLVAAGGVIVPMLCEYYALEGISDLIATVRKIRQAVNPDLDITGIVRTMYDSRSRLVAEVSEQLRSHFGDLLFETVIPRNIRLAEAPSHGMPVMAYDAQAKGAKAYLALADELMARVSGK

SEQ ID NO: 3511 - protein, 154 aa, Neisseria
MLRVRPVLFAVKASASSIPCRICRLKRSRLPNIFRRILFSCRRRTCFCKACKNSPIRNETSSSGRRQFSVEKANTVRYCTPSLAQCFTIFSNASKPRLCPIIRGRKRFFAQRPLPSIITAMCLGMAVCSKMVCVLLFISAFRGSAFKCRLNAAP

SEQ ID NO: 3512 - protein, 257 aa, Neisseria
MLRVRPVLFAVNASASSMPCRICRLKRSRLPNIFRRILFSCRRRTCFCKACKNSPIRNETSSSGRRQFSVEKANTVRYCTPSLAQCFTIFSNASKPRLCPIMRGRKRFFAQRPLPSIITAICLGMAVCSKTACVLLFMSAFRGSAFKCRLNAEPCRLNCHQIFFFGSQEFVGFGNVFVGQFLNRFFAATCLVFGNFFVFEEFFDVVVGIAAHVADRDAAFFRFAAYDFNQVFAAFLGQHGHRHADQVADSCRVQSQV

SEQ ID NO: 3513 - protein, 256 aa, Neisseria
MLRVRPVLFAVKASASSMPFRIRLKRSRLPSIFRRILFSCRRRTCFCKACKNSPIRNETSSSGRRQFSVEKANTVRYCTPSLAQCFTIFSNASKPRLCPIMRGRKRFFAQRPLPSIITAICLGMAVCSKTACVLLFMSAFRGSAFKCRLNAEPCRLNCHQIFFFGSQEFVGFGNVFVGQFLNRFFAATCLVFGNFFVFEEFFDVVVGIAAHVADGDAAFFRFAAYDFNQVFAAFLGQHGHRHADQVADSCRVQSQV

SEQ ID NO: 3514 - protein, 130 aa, Neisseria
MLKQRVITAMWLLPLMLGMLFYAPQWLWAAFCGLIALTALWEYARMAGLCKTETNHYLAATLVFGVVAYAGGWMLPNLVWYVVLAFWLAVMPLWLRFKWRLNGGWQVYAVGWLLLMPFWFALVSLAPASR

SEQ ID NO: 3515 - protein, 265 aa, Neisseria; identical to SEQ ID NO: 777

SEQ ID NO: 3516 - protein, 265 aa, Neisseria
MLKQRVITAMWLLPLMLGMLFYAPQWLWAAFCGLIALIALWEYARMGGLCKIKTNHYLAATLVFGVVAYAGGWMLPNLVWYVVLAFWLAVMPLWLRFKWRLNGGWQVYAVGWLLVMPFWFALVSLRPHPDDALPLLAVMGLVWVADICAYFSGKAFGKHKIAPAISPGKSWEGAIGGAVCVAVYMTAVRSAGWLAFDTGWFDTVLIGLVLTVVSVCGDLLESWLKRAAGIKDSSNLLPGHGGVFDRTDSLIAVISVYAAMMSVLN

SEQ ID NO: 3517 - protein, 166 aa, Neisseria
MIRLTRAFAAALIGLCCTTGAHADTFQKIGFINTERIYLESKQARNIQKTLDGEFSARQDELQKLQREGLDLERQLAGGKLKDAKKAQAEEKWRGLVEAFRKKQAQFEEDYNLRRNEEFASLQQNANRVIVKIAKQEGYDVILQDVIYVNTQYDVTDSVIKEMNAR

SEQ ID NO: 3518 - protein, 166 aa, Neisseria; identical to SEQ ID NO: 773

SEQ ID NO: 3519 - protein, 166 aa, Neisseria
MTRLTRAFAAALIGLCCTAGAHADTFQKIGFINTERIYLESKQARKIQKTLDSEFSARQDELQKLQREGLDLERQLAEGKLKDAKKAQAEEKWCGLVAAFRKKQAQFEEDYNLRRNEEFASLQQNANRVIVKIAKQEGYDVILQDVIYVNTQYDVTDSVIKEMNAR

SEQ ID NO: 3520 - protein, 119 aa, Neisseria
MRVFRVNRFVVTVFGGGIGSAVPHAACVGKQAQADGACVFRTGHREEQLGGDVGFFVAAVADFFAVFVIHFRAERAAFVAAHRTQAAAVEVFKEGDFFGSAVAARNADFAAEHQREGFA

SEQ ID NO: 3521 - protein, 160 aa, Neisseria
MGIAGAVNVLNPAAGRGTAVVVVGFAVPHAACVGKQAQADGARVFRAGHREEQLGGDVGFFVAAVADFFAVFVIDFRTERAAFVSAHRTQAAAVEVFKEGDFFGSAVAARNADFAAEHQREGFAQGEEPGLVVGGGVVLQFAARQGDFGVHARQVAARRP

SEQ ID NO: 3522 - protein, 159 aa, Neisseria
MGIAGAVNVLNPAAGRGTAVVVVGFAVPHAACVGKQAQADGARVFRAGHREEQLGGDVGFFVAAVADFFAVFVIHFRTERAAFVSAHRTQAAAVEVFKEGDFFGSAVAARNADFAAEHQREGFAGEEPGLVVGGGVVLQFAAGQGDFGVHARQVAARRP

SEQ ID NO: 3523 - protein, 250 aa, Neisseria
MCAIVGAAGLPSALAAAQKGKTIYLANKETLVVSGALFMETARANGAAVLPVDSEHNAIFQVLPRDYTDRLNEHGIDSIILTASGGPFLTTDLSTFDSITPEQAVKHPNWRMGRKISVDSATMANKGLELIEAHWLFNCPPDKLEVVIHPQSVIHSMVRYRDGSVLAQLGNPDMRTPIAYCLGLPERIDSGVGKLDFGALSALTFQKPDFGRFPCLKFAYETINAGGAAPCVLNAANETAVAAFLDGQIK

SEQ ID NO: 3524 - protein, 295 aa, Neisseria
MCAIVGAVGLPSALAAAQKGKTIYLANKETLVVSGALFMETARANGAAVLPVDSEHNAVFQVLPRDYAGRLNEHGIASIILTASGGPFLTADLNTFDRITPAQAVKHPNWRMGRKISVDSATMMNKGLELIEAHWLFNCPPDKLEVVIHPQSVIHSMVRYRDGSVLAQLGNPDMRTPIAYCLGLPERIDSGVGDLDFDALSALTFQKPDFDRFPCLRLAYEAMNAGGAAPCVLNAANEAAVAAFLDGQIKFTDIAKTVAHCLAQDFSDGIGDIGGLLAQDARTRAQARAFIGTLR

SEQ ID NO: 3525 - protein, 295 aa, Neisseria
MCAIVGAVGLPSALAAAQKGKTIYLANKETLVVSGALFMETARANGAAVLPVDSEHNAVFQVLPRDYTGRLNEHGIASIILTASGGPFLTADLNTFDSITPDQAVKHPNWRMGRKISVDSATMMNKGLELIEAHWLFNCPPDKLEVVIHPQSVIHSMVRYRDGSVLAQLGNPDMRTPIAYCLGLPERIDSGVGDLDFDALSALTFQKPDFDRFPCLKLAYEAMNAGGAAPCVLNAANEAAVAAFLDGQIKFTDIAKTVAHCLSQDFSDGIGDIGGLLAQDARTRAQARAFIGTLR

SEQ ID NO: 3526 - protein, 364 aa, Neisseria
MPCLCRLNRNIGSFQITNLTDHNDVRVLTQERLQSSGKSQTLLIIDVNLIDARQVNLGRVFRRCNIYRLRIQNIQTGIERHRLTRTRRTGYQHHPVRTVNRFQQQFFLERLKTELVDVQRRGIGIQNPHHDLFAKQRRQCADTEIDRLAALLKGQLHPTVLRYPFFGNVQTRHYLNPGSKLPPYRNGRLNHLAELPVHTETDTRIVFVKLEMDVGCPATQGIRQSFMDKPRNRAVFCLLVVDIQGVAFLFLLPLPKLLKQRCRTRTHPIEQTRQLVILDNDQLNRNPCGRNRFLNLRHLGRIGNRKKYFVAPTENRHTVELHHLLLRQHPHQHPVARIMTQIKNRITEHPRNQCRKRLGRNDTV

SEQ ID NO: 3527 - protein, 363 aa, Neisseria
  VARIANT (1)...(363): Xaa = Any Amino Acid
MPCLCRLNRNIGSFQITNLTDHNDVRVLTQERLQSSGKSQALLIIDVNLIDARQVNLGRVFRRCNIYRLRIQNIQTGIERHRLTRTRRTGYQHHPVGTVNRYQHXFFLKRLKTELVDVQRRGIGIQNPHHDLFAKQRRQCADTEIDRLAALLKGQLHPAVLRYPFFGNVQTRHYLNPSKLPPYRNGRLNHLAELPVHTETDTGIVFVKLEMDVRCPAAQGIRQSLMDKPRNRAVFCLLVVDIQGVAFLFLLPLPKLLKQRCRTRTHPIEQTRQLVILDNDQLNLNPCGRNGFLNLRHLCRIGNRKKYFVAPTENRHTVELHHLLLRQHPHQHPVARIMTQIKNRITEHPRNQCRKRLGRNDTV

SEQ ID NO: 3528 - protein, 364 aa, Neisseria
MPCLCRLNRNIGSFQITNLTDHNDVRVLTQERLQSSGKSQTLLIIDVNLIDARQVNLGRVFRRCNIYRLRIQNIQTGIERHRLTRTRRTGYQHHPVGTVNRFQQQFFLKRLKTELVDVQRRGIGIQNPHHDLFAKQRRQCADTEIDRLAALLKGQLHPAVLRYPFFGNVQTRHYLNPGSKLPPYRNGRLNHLAELPVHTETDTGIVFVKLEMDVRCPAAQGIRQSLMDKPRNRAVFCLLVVDIQGVAFLFLLPLPKLLKQRCRTRTHPIEQTRQLVILDNDQLNLNPCGRNGFLNLRHLCRIGNRKKYFVAPTENRHTVELHHLLLRQHPHQHPVARIMTQIKNRITEHPRNQCRKRLGRNDTV

SEQ ID NO: 3529 - protein, 402 aa, Neisseria
MLPNLPNSLKKADMDNELWIILLPIILLPVFFTMGWFAARVDMKTVLKQAKSIPSGFYKSLDALVDRNSGRAARELAEVVDGRPQSYDLNLTLGKLYRQRGENDKAINIHRTMLDSPDTVGEKRARVLFELAQNYQSAGLVDRAEQIFLGLQDGEMAREARQHLLNIYQQDRDWEKAVETAQLLSHDEQTYQFEIAQFYCELAQAALFKSNFDAARFNVGKALEANKKCTRANMILGDIEHRQGNFPAAVEAYAAIEQQNHAYLSMVGEKLYEAYAAQGKPEEGLNRLTGYMQTFPELDLINVVYEKSLLLKGEKEAAQTAVELVRRKPDLNGVYRLLGLKLSDLDPAWKADADMMRSVIGRQLQRSVMYRCRNCHFKSQVFFWHCPACNKWQTFTPNKIEV

SEQ ID NO: 3530 - protein, 402 aa, Neisseria
MRPNLPNSLKKADMDNELWIILLPIILLPVFFAMGWFAARVDMKTVLKQAKSIPSGFYKSLDALVDRNSGRAARELAEVVDGRPQSYDLNLTLGKLYRQRGENDKAINIHRTMLDSPDTVGEKRARVLFELAQNYQSAGLVDRAEQIFLGLQDGKMAREARQHLLNIYQQDRDWEKAVETARLLSHDDQTYQFEIAQFYCELAQAALFKSNFDVARFNVGKALEANKKCTRANMILGDIEHRQGNFPAAVEAYAAIEQQNHAYLSMVGEKLYEAYAAQGKPEEGLNRLTGYMQTFPELDLINVVYEKSLLLKCEKEAAQTAVELVRRKPDLNGVYRLLGLKLSDMNPAWKADADMMRSVIGRQLQRSVMYRCRNCHFKSQVFFWHCPACNKWQTFTPNKIEV

SEQ ID NO: 3531 - protein, 402 aa, Neisseria
MRPNLPNSLEKADMDNELWIILLPIILLPVFFAMGWFAARVDMKTVLKQAKSIPSGFYKSLDALVDRNSGRAARELAEVVDGRPQSYDLNLTLGKLYRQRGENDKAINMHQTLLDSPDTTGAKRARVLFELAQNYQSAGLVDRAEQIFLGLQDGEMAREARQHLLNIYQQDRDWEKAVETARLLSHDDQTYQFEIAQFYCELAQAALFKSNFDAARFNVGKALEANKKCTRANMILGDIEHRQGNFPAAVEAYAAIEQQNHAYLSMVGEKLYEAYAAQGKPEEGLNRLTGYMQTFPELDLINVVYEKSLLLKCEKEAAQTAVELVRRKPDLNGVYRLLGLKLSDLDPAWKADADMMRSVIGRQLQRSVMYRCRNCHFKSQVFFWHCPACNKWQTFTPNKIEV

SEQ ID NO: 3532 - protein, 186 aa, Neisseria
MPCLRRQAARCTNRRTDRQTVRFRFLLRQKPVRQVRQRVRRQLHWLFPQQVRKRCYRFRRSACRWQKRRLLGGADSAAVSDAAVFAAGTGPGWRSVAEAGVSDTAGLGSGRTAGFSAFASGAATFASGFSTGFSTGFSIGFSTVACLDGSDGMDAVSALGFAVCGLGCSALIFLGAAALILFRFGM

SEQ ID NO: 3533 - protein, 344 aa, Neisseria
MVSGEEAFRKPASPEGEAGFAEAVSSVPIWLFEGRLSEKSVSTVSGLFSAVWATDSGSGVSMTISTGLYGLKVSGSYTLSVDSMAFQSASARFWVSSSCVSAPDKMPFCAAARLSKSKSMRLEGVSVSTSNVCFADNSSSDSPSKASVSFTSFFGAGSGVAGVSTSAKVISMPSSAASSRSGSSSGTDSSVRRARLDWARRKSSSRAINAAPPPASSKVYEPPNRPSNSPLSVSSSAETCSTGSETALPVSSVGVSMAEAAASWGADSAAVSDAAVFAAGTGSGRTAGFSAFASGAATFASGFSTGFSTVACLDGSDGMDAVSALGFAVCGLGCSALILFRFGM

SEQ ID NO: 3534 - protein, 340 aa, Neisseria
MVSGEEAFRKPASPEGEAGFAEAVSSVPIWLFEGRLSEKSVSTVSGLFSAVWATDSGSGVSMTISTGLYGLKVSGSYTLSVDSMAFQSASARFWVSSSCVSAPDKMPFCAAARLSKSKSMRLEGVSVSTSNVCFADNSSSDSPSKASVSFTSFFGAGSGVAGVSTSAKVISMPSSAASSRSGSSSGTDSSVRRARLDWARRKSSSRAINAAPPPASSKVYEPPNSPLSVSSSAETCSTGSETALPVSSVGVSMAEAAASWGADSAAVSDAAVFAAGTGSGRTAGFSAFASGAATFASGFSTGFSTVACLDGSDGMDAVSALGFAVCGLGCSALILFRFGM

SEQ ID NO: 3535 - protein, 215 aa, Neisseria
MGVDIGRSLKQMKEQGAEIDLKVFTDAMQAVYDGKEIKMTEEQAQEVMMKFLQEQQAKAVEKHKADAKANKEKGEAFLKENAAEDGVKTTASGLQYKITKQGEGKQPTKDDIVTVEYEGRLIDGTVFDSSKANGGPATFPLSQVIPGWTEGVRLLKEGGEATFYIPSNLAYREQGAGEKIGPNATLVFDVKLVKIGAPENAPAKQPDQVDIKKVN

SEQ ID NO: 3536 - protein, 222 aa, Neisseria
MQQASYAMGVDIGRSLKQMKEQGAEIDLKVFTEAMQAVYDGKEIKMTEEQAQEVMMKFLQEQQAKAVEKHKADAKANKEKGEAFLKENAAKDGVKTTASGLQYKITKQGEGKQPTKDDIVTVEYEGRLIDGTVFDSSKANGGPVTFPLSQVIPGWTEGVQLLKEGGEATFYIPSNLAYREQGAGDKIGPNATLVFDVKLVKIGAPENAPAKQPAQVDIKKVN

SEQ ID NO: 3537 - protein, 272 aa, Neisseria
MNTIFKISALTLSAALALSACGKKEAAPASASEPAAASSAQGDTSSIGSTMQQASYAMGVDIGRSLKQMKEQGAEIDLKVFTEAMQAVYDGKEIKMTEEQAQEVMMKFLQEQQAKAVEKHKADAKANKEKGEAFLKENAAKDGVKTTASGLQYKITKQGEGKQPTKDDIVTVEYEGRLIDGTVFDSSKANGGPVTFPLSQVILGWTEGVQLLKEGGEATFYIPSNLAYREQGAGDKIGPNATLVFDVKLVKIGAPENAPAKQPAQVDIKKVN

SEQ ID NO: 3538 - protein, 272 aa, Neisseria
MNTIFKISALTLSAALALSACGKKEAAPASASEPAAASAAQGDTSSIGSTMQQASYAMGVDIGRSLKQMKEQGAEIDLKVFTDAMQAVYDGKEIKMTEEQAQEVMMKFLQEQQAKAVEKHKADAKANKEKGEAFLKENAAKDGVKTTASGLQYKITKQGEGKQPTKDDIVTVEYEGRLIDGTVFDSSKANGGPATFPLSQVIPGWTEGVRLLKEGGEATFYIPSNLAYREQGAGEKIGPNATLVFDVKLVKIGAPENAPAKQPDQVDIKKVN

SEQ ID NO: 3539 - protein, 272 aa, Neisseria; identical to SEQ ID NO: 2103

SEQ ID NO: 3540 - protein, 272 aa, Neisseria; identical to SEQ ID NO: 3537

SEQ ID NO: 3541 - protein, 160 aa, Neisseria
MERSGVFGKIVGNRILRMPSEHAAAFYPKPCKSFKLTQSWFRVRSCPCGVFIYGANMKLIYTVIKIIILLLFLLLAVINMDAVTFSYLPGQSVNLPLIVVLFGAFVVGIVFGMFALFGRLLSLRGENSRLRAEVKKSARLSGQKLTAPPIQNAAESAKQP

SEQ ID NO: 3542 - protein, 160 aa, Neisseria; identical to SEQ ID NO: 920

SEQ ID NO: 3543 - protein, 160 aa, Neisseria
MERNGVFGKIVGNRILRMSSEHAAASYPKPCKSFKLAQSWFRVRSCPGGVFIYGANMKLIYTVIKIIILLLFLLLAVINTDAVTFSYLPGQKFDLPLIVVLFGAFVVGIVFGMFALFGRLLSLRGENGRLRAEVKKNARLTGKELTAPPAQNAPESAKQP

SEQ ID NO: 3544 - protein, 106 aa, Neisseria
MGKLDIGILFADFFKDFAPQFGGFQNVGFAYGADFFAAFLGGLEGHVGDAADFAFAVFHGVVAFVFAVFQNTDAARFAEINIAGKFAHNQNIQTGNDFRLERGGVG

SEQ ID NO: 3545 - protein, 106 aa, Neisseria
MGKLDIRVLFADFFKDFAPQFGGFQNVGFAYGTDFFAAFLGGLEGNMGNTADFAFAVFHGVVAFAFAVFQNADAARFAEIDVAGEFAHNQNIQTGNDFRLQRGGVG

SEQ ID NO: 3546 - protein, 106 aa, Neisseria
MGKLDIRVFFADFFKDFAPQFGGFQNVGFAYGADFFAAFLGGLEGDVGNTADFAFAVFHGVVAFAFAVFQNTDAARFAEINIAGEFAHNQNIQTRNDFRLERGGVG

SEQ ID NO: 3547 - protein, 231 aa, Neisseria
MRAAMTRAQVDATLISFLCNVANIGLLILVIIAALGRLGVSTTSVTALIGGAGLAVALSLKDQLSNFAAGALIILFRPFKVGDFIRVGGFEGYVREIKMVQTSLRTTDNEEVVLPNSVVMGNSIVNRSSLPLCRAQVIVGVDYNCDLKVAKEAVLKAAAEHPLSVQNEERQPAAYITALGDNAIEITLWAWANEADRWTLQCDLNEQVVENLRKVNINIPFPQRDIHIINS

SEQ ID NO: 3548 - protein, 231 aa, Neisseria
MRAAMTRAQVDATLISFLCNVANIGLLILVIIAALGRLGVSTTSVTALIGGAGLAVALSLKDQLSNFAAGALIILFRPFKVGDFIRVGGFEGYVREIKMVQTSLRTTDNEEVVLPNSVVMGNSIVNRSTLPLCRAQVIVGVDYNCDLKVAKEAVLKAAVEHPLSVQNEERQAAAYITALGDNAIEITLWAWANEADRWTLQCDLNEQVVENLRKVNINIPFPQRDIHIINS

SEQ ID NO: 3549 - protein, 231 aa, Neisseria; identical to SEQ ID NO: 3548

SEQ ID NO: 3550 - protein, 282 aa, Neisseria
MDFKQFDFLHLISVSGWGHLAEKAWAFGLNLAAALLIFLVGKWAAKRIVAVMRAAMTRAQVDATLISFLCNVANIGLLILVIIAALGRLGVSTTSVTALIGGAGLAVALSLKDQLSNFAAGALIILFRPFKVGDFIRVGGFEGYVREIKMVQTSLRTTDNEEVVLPNSVVMGNSIVNRSSLPLCRAQVIVGVDYNCDLKVAKEAVLKAAAEHPLSVQNEERQPAAYITALGDNAIEITLWAWANEADRWTLQCDLNEQVVENLRKVNINIPFPQRDIHIINS

SEQ ID NO: 3551 - protein, 282 aa, Neisseria; identical to SEQ ID NO: 643

SEQ ID NO: 3552 - protein, 282 aa, Neisseria
MDFKQFDFLHLISASGWEHLAEKAWAFGLNLAAALLIFLVGKWAAKRIVAVMRAAMTRAQVDATLISFLCNVANIGLLILVIIAALGRLGVSTTSVTALIGGAGLAVALSLKDQLSNFAAGALIILFRPFKVGDFIRVGGFEGYVREIKMVQTSLRTTDNEEVVLPNSVVMGNSIVNRSTLPLCRAQVIVGVDYNCDLKVAKEAVLKAAVEHPLSVQNEERQAAAYITALGDNAIEITLWAWANEADRWTLQCDLNEQVVENLRKVNINIPFPQRDIHIINS

SEQ ID NO: 3553 - protein, 100 aa, Neisseria
MDSPKVGCGWMVLPMSAASQPISMARQTSPIMSPPFGPTMPPPMMRPVSASKISLVKPLSQPLAIARPEAAHGKLALVILRPDALADNSVSPTHATSGEV

SEQ ID NO: 3554 - protein, 100 aa, Neisseria
MDSPKVGCGWMVLPMSAASQPISMARQTSPIISPPFGPTMPPPMMRPVSASKISLVKPLSQPLAIARPEAAHGKLALVILRPEALADSSVSPTHATSGEV

SEQ ID NO: 3555 - protein, 100 aa, Neisseria
MDSPKVGCGWMVLPMSAASQPISMARQTSPIMSPPFGPTMPPPMMRPVSASKISLVKPLSQPLAIARPEAAHGKLALVILRPEALADNSVSPTHATSGEV

SEQ ID NO: 3556 - protein, 113 aa, Neisseria
MHFAQLVGQTGIEQNTFCRRGFTRIDMGGNTDVAVQADRGLTSHFISLSKLETEVRECFVGFSHTVYFFTFFQRTATAFGRINQLACQTQIHGFLTTFAGRVANPTHCQSQTA

SEQ ID NO: 3557 - protein, 113 aa, Neisseria
MHFAQLVGQTGIEQNTFCRRGFTRVNMGGNTDVTVQADRGLTSHFISLSKLETEVRECFVGFSHTVYFFTFFQRTATAFGRINQFACQTQVHGFLTTFAGRIANPAHCQSQTA

SEQ ID NO: 3558 - protein, 112 aa, Neisseria
MHFAQLVGQTGIEQNTFCRRGFTRIDMGGNTDVTVQADRGLTSHFISLSKLETEVRECFVGFSHTVYFFTFFQRTATAFGRINQFACQTQVHGFLTTFAGRINPAHCQSQTA

SEQ ID NO: 3559 - protein, 370 aa, Neisseria
MRYILLTGLLPTASAFGETALQCAALTDNVTRLACYDRIFAAQLPSSAGQEGQESKAVLNLTETVRSSLDKGEAVIVVEKGGDALPADSAGETADIYTPLSLMYDLDKNDLRGLLGVREHNPMYLMPFWYNNSPNYAPSSPTRGTTVQEKFGQQKRAETKLQVSFKSKIAENLFKTRADLWFGYTQRSDWQIYNQGRKSAPFRNTDYKPEIFLTQPVKADLPFGGRLRMLGAGFVHQSNGQSRPESRSWNRIYAMAGMEWGKLTVIPRVWVRAFDQSGDKNDNPDIADYMGYGDVKLQYRLNDRQNVYSVLRYNPKTGYGAIEAAYTFPIKGKLKGVVRGFHGYGESLIDYNHKQNGIGIGLMFNDWDGI

SEQ ID NO: 3560 - protein, 370 aa, Neisseria
MRYILLTGLLPMASAFGETALQCAALTDNVTRLACYDRIFAAQLPSSAGQEGQESKAVLNLTETVRSSLDKGEAVIVVEKGGDALPADSAGETADIYTPLSLMYDLDKNDLRGLLGVREHNPMYLMPLWYNNSPNYAPGSPTRGTTVQEKFGQQKRAETKLQVSFKSKIAEDLFKTRADLWFGYTQRSDWQIYNQGRKSAPFRNTDYKPEIFLTQPVKADLPFGGRLRMLGAGFVHQSNGQSRPESRSWNRIYAMAGMEWGKLTVIPRVWVRAFDQSGDKNDNPDIADYMGYGDVKLQYRLNDRQNVYSVLRYNPKTGYGAIEAAYTFPIKGKLKGVVRGFHGYGESLIDYNHKQNGIGIGLMFNDLDGI

SEQ ID NO: 3561 - protein, 370 aa, Neisseria; identical to SEQ ID NO: 3560

SEQ ID NO: 3562 - protein, 202 aa, Neisseria
MIIDQSQIFTHLAFCAFCGIGAVTAGNRLHNRMYNAAAARGIGRGNGSQQQFGKSETVTDAQRFSSKNGDKQISDTHPQPCFEQTARNHNCDGNQPNQRIGERTQRIAHRRARFVGGYAGYCDQPDGNNRQRAQRHNLADNGGNHTDKHSQQRPSLRLDPVGYGQCQNQGAQYCGNGEGYRFETQFHHIDLRKKDRPEKSEK

SEQ ID NO: 3563 - protein, 202 aa, Neisseria
MIVDQSQIFTHLAFCAFCGIGAVTAGNRLHNRMYNAAAARGIGRGNGSQQQFGKSETVTDAQRFSSKNGDKQISDTHPQPCFEQTARNHNCDGNQPNQRIGERTQRIAHRRARFVGGYAGYCDQPDGNNRQRAQRHGLADNGGNHTDKHGQQRPSLRLDPVGYGQCQNQGAQYCGNGEGYRFETQFHHIDLRKKDRPEKSEK

SEQ ID NO: 3564 - protein, 202 aa, Neisseria
MIVDQSQIFTHLAFCAFCGIGAVTAGNRLHNRMYNAAAARGIGRGNGSQQQFGKSETVTDAQRFSSKNGDKQISDTHPQPCFEQTARNHNCDGNQPNQRIGERTQRIAHRRTRFVGGYAGYCDQPDGNNRQRTQRHGLADNGGNHTDKHGQQRPSLRLDPVGYGQCQNQGAQYCGNGEGYRFETQFHHIDLRKKDRPEKSEK

SEQ ID NO: 3565 - protein, 234 aa, Neisseria
MLRSILAASLLAVSFPAAAEALNYNIVEFSESAGIEVAQDTMSARFQVAAEGRDKNAVNAEFVKKFNNFTRKSKNGSFKTELVSRSAMPRYQYTNGRRIQTGWEERAEFKAEGRDFDALNRFIADVQTDASLEDTDFSVSRERRNEVIDQVSKDAVLRFKARAEKLAGVLGASGYKIVKLNFGQIGSHIAGDGAVRAKMLRAMPMAASVNMKGTDSAAPGVEEISISINGTVQF

SEQ ID NO: 3566 - protein, 234 aa, Neisseria
  VARIANT (1)...(234): Xaa = Any Amino Acid
MLRLVLAASLSAVSFPAAAEALNYNIVEFSESAGVEVAQDTMSARFQVTAEGRDKNAVNAEFVKKFNKFIRKSKNGSFKTELVSRSAMPRYQYTNGRRIQTGWEERAEFKVEGRDFDELNRFIADIQADAALXYTDFHVSRERRNEVIXQVSKDAVLRFKARAEKLAGVLGASGYKIVKLNLGHIGSHIAGGGAAQAKMLRAMPMAASVNMEGADSAAPGVEEISISVNGTVQF

SEQ ID NO: 3567 - protein, 220 aa, Neisseria
MLRSILAASLLIVEFSESAGVEAVQDTMSARFQVTAEGRDKNAVNAEFVKKFNNFTRKSKNGSFKTELVSRSAMPRYQYTNGRRIQTGWEERAEFKVEGRNFDALNRFIADVQADAALEYTDFHVSRERRNEVIDQVSKDAVLRFKARAEKLAGVLGASGYKIVKLNLGHIGSHIAGGGAAQAKMLRAMPMAASVNMEGADSAAPGVEEISISVNGTVQF

SEQ ID NO: 3568 - protein, 231 aa, Neisseria
MKLFQRIFATFCAVIVCAIFVASFSFWLVQNTLAENQFNQRRTIETTLMGSIISAFKTRGDNGAREILTEWKNSPVSSAVYVIQGDEKKDILNRYIDNYTIERARLFAANNPHSNLVRIEYDRFGEEYLFFIKGWDNHQAQRLPSPLFIPGLPLAPIWHEFIILSFIIIVGLLMAYILAGNIAKPIRILGNGMDRVAERELEDRVCQQVRDRDDELADVAMQFDTMVEKLE

SEQ ID NO: 3569 - protein, 468 aa, Neisseria; identical to SEQ ID NO: 1171

SEQ ID NO: 3570 - protein, 468 aa, Neisseria
MKLFQRIFATFCAVIVCAIFVASFSFWLVQNTLAENQFNQRRTIETTLMGSIISAFRARGDAGAREILTEWKDSPVSSGVYVIQGDEKKDILHRYIDSYTIERARLFAAGHPHSNLVHIEYDRFGEEYLFFTKDWDKLQARRLPSPLLIPGLPLAPIWHELIILSFIIIVGLLMAYILAGNIAKPIRILGNGMDRVANGELETRISQQVDDRDDELSHLAIQFDKMVEKLEKLVAKERHLLHHVSHEMRSPLARMQAIVGLIQAQPQKQEQYLKRLEGELTRMDTLAGELLTLSRLETSNMALEKESLKLLPFLGNLVEDNQSIAQKNGQTVTLSADGKIPENTTILANESYLYRAFDNVIRNAVNYSPEGSTILINIGQDHKHWIIDVTDNGPGVDEMQLPHIFTAFYRADSSANKPGTGLGLALTQHIIEQHCGKIIAENIKPNGLRMRFILPKKKTGSKTEKSAN

SEQ ID NO: 3571 - protein, 209 aa, Neisseria
MAAHLEEQQELDNFKYFWKTTGKWLFALLILAALGYLGYTVYQNRAASQNQEAAAVLANIVEKAQNKAPQSEINAELSKLQQSYPHSISAAQATLMAAATEFDAQRYDVAEGHLKWVLSNQKDSLIQALAAQRLGVVLLQQKKYDAALAALDTPVEADFAPLLMETKGDVYAAQEKSQEALKNYGQALEKMPQDSVGRELLQMKLDSLK

SEQ ID NO: 3572 - protein, 209 aa, Neisseria; identical to SEQ ID NO: 1426

SEQ ID NO: 3573 - protein, 209 aa, Neisseria
MAAHLEEQQELDNFKYFWKTTGKWLFAVLILAALGYLGYTVYQNRAASQNQEAAAVLANIVEKAQNKAPQSEINAELAKLQQSYPHSISAAQATLMAAATEFDAQRYDVAEGHLKWVLSNQKDSLIQALAAQRLGVVLLQQKKYDAALAALDTPVEADFAPLLMETKGDVYAAQGKSQEALKNYGQALEKMPQDSVGRELVQMKLDSLK

SEQ ID NO: 3574 - protein, 180 aa, Neisseria
MKRIFLPALPAILPLSAYADLPLTIEDIMTDKGKWKLETSLTYLNSENSRAALAAPVYIQTGATSFIPIPTEIQENGSNTDMLAGTLGLRYGLTGNTDIYGSGSYLWHEERKLDGNGKTRNKRMSDISAGISHTFLKDGKNPALISFLESTVYEKSRNKASLIKKRGLCPFYNLRINYEY

SEQ ID NO: 3575 - protein, 721 aa, Neisseria
  VARIANT (1)...(721): Xaa = Any Amino Acid
GDDFFFFLFALMKRIFLPALPAILPLSTYADLPLTIEDIMTDKGKWKLETSLTYLNSENNRAELAAPVYIQTGATSFIPIPTEIQENGSNTDMLVGTLGLRYGLTGNTDIYGSGSYLWHEERKLDGNSKTRNKRMSDVSLGISHTFLKDDKNPALISFLESTVYEKSRNKASSGKSWLIGATTYKAIDPIVLSLTAAYRINGSKTLSDGIRYKSGNYLLLNPNISFAANDRISLTGGIQWLGRQPDRTDGKRESSRNTSTYAHFGAGFGFTKTTALNASARFNVSGQCYQNRMALMHADEFALTPARAGRAPHFNTDDSEQENCECQHMHNHAHWHKSERVERDATAMHCHIRNNSEDCQQQQPGTIMESNEWRMANSYMNLARIALCRIERNEWHCFCFMKRIFLPALPAILPLSTYADLPLTIEDIMTDKGKWKLETSLTYLNSENNRHKHKHDPHPXMKRIFLPALPAILPLSTYADLPLTIEDIMTDKGKWKLETSLTYLNSENNRMHKRIFHKNRMALFHKLFKMICRSFTWRDSAADLHPWWKMNFMKRIFLPALPAILPLSTYADLPLTIEDIMTDKGKWKLETSLTYLNSENNRTITLEPIDGIDANEADDAEACNDCRTENTRYREFHYAPATANLEWRDDCMENTSMMARYINFRMATINDCMENTSMMARYINFRMFMICRSFTWRDDCMENTMSWRDDCWRDDCMENTQ

SEQ ID NO: 3576 - protein, 289 aa, Neisseria
MKRIFLPALPAILPLSAYADLPLTIEDIMTDKGKWKLETSLTYLNSENNRAELAAPVYIQTGATSFIPIPTEIQENGSNTDMLVGTLGLRYGLTGNTDIYGSGSYLWHEERKLDGNGKTRNKRMSDVSLGISHTFLKDDKNPALISFLESTVYEKSRNKASSGKSWLIGATTYKAIDPVVLSLTAAYRINGSKTLSSNTKYKAGNYWMLNPNISFAANDRISLTGGIQWLGKQPDRLDGKKESARNTSTYAHFGAGFGFTKTTALNASARFNVSGQSSSELKFGVQHTF

SEQ ID NO: 3577 - protein, 129 aa, Neisseria
MLKHLAFLLPAMMFALPAQTAVLSPYQETGCTYEGGIGKDGLPSGKGIWRCRDGRGYTGSFKNGKFDGQGVYTVAAGREVFLEPFNSDSTKFRNMALSGTFKQGLAHGRFAASQNGETLFYYEMRTRHD

SEQ ID NO: 3578 - protein, 138 aa, Neisseria; identical to SEQ ID NO: 1423

SEQ ID NO: 3579 - protein, 138 aa, Neisseria
MLKHLAFLLPAMMFALPAASAVLTSYQEPGCTYEGDVGKDGKPAGKGTWRCQDGRNYTGSFKNGKFDGQGVYTVAANREIFIEPFNSDSTKFRNMVLSGTFKKGLAHGRFTVSQNGETLFIMKCENGMIKEVKLPKNK

SEQ ID NO: 3580 - protein, 725 aa, Neisseria
MQQKIRFQIEAMTCQACASRIEKVLNKKDFVESAGVNFASEEAQVTFDGSKTSVADIAKIIEKTGYGAKEKTEDTLPQPEAEHHIGWRLWLLLTINIPFLIGMVGMMLKGLNWTRHDWMIPPVWQFVLASIVQLWLAIPFYKSAWASIKGGLANMDVLVTIGTVSIYLYSVYMLFFSSHAAHGMAHVYFEAGVMVIGFVSLGKFLEHRTKKSSLNSLGLLLKLTPTQVNVQRNGEWKQLPIDQVQIGDLIRTNHGERIAADGIIESGSGWADESHLTGESNPEEKKAGGKVLAGALMTEGSVVYRAAQLGSQTLLGDMMNALSEAQGSKAPIARVADKAAAVFVPTVVGIALLTFIVAWLIKGDWTVALMHAVAVLVIACPCALGLATPAAIMVGMGKAVKHGIWFKDAAAMEEAAHVDAVVLDKTGTLTEGRPQVAAVYYVPDSGFDEDALYRIAAAVEQNAAHPLARAIVSAAQARGLEIPAAQNAQTVVGAGITAEVEGVGLVKSGKAEFAELTLPKFSDGVWEIASAVTVSVNGKPIGAFALSDALKADTAEAIGRLKKHNIDVYIMSGDNQSTVEYVAKQLGIAHAFGNMSPCDKAAEVQKLKAAGKTVAMVGDGINDAPALAAANVSFAMKGGADVAEHTASATLMQHSVNQLADALLISQATLENIKQNLFFAFFYNILGIPLAALGFLNPVIAGAAMAASSVSVLGNALRLKWVKID

SEQ ID NO: 3581 - protein, 720 aa, Neisseria; identical to SEQ ID NO: 1873

SEQ ID NO: 3582 - protein, 725 aa, Neisseria
MQQKVRFQIEGMTCQACASRIEKVLNKKDFVESAGVNFASEEAQVVFDDSKTSVADIAKIIEKTGYGAKEKTEDTLPQPEAEHHIGWRLWLLLAINIPFLIGMVGMMLKGLNWTRHDWMLSPLLQFALASVVQLWLAVPFYKSAWASIKGGLANMDVLVTIGTVSIYLYSVYMLFFSPHAAYGMAHVYFEVGIMVIGFVSLGKFLEHRTKKSSLNSLGLLLKLTPTQVNVQRDGEWRQLPIDQVQIGDLIRANHGERIAADGIIESGSGWADESHLTGESNPEEKKAGGKVLAGALMTEGSVVYRAAQLGSQTLLGDMMNALSEAQGSKAPIARVADKAAAVFVPAVVGIALLTFIATWLIKGDWTLALMHAVAVLVIACPCALGLATPAAIMVGMGKAVKHGIWFKDAAAMEEAAHVDAVVLDKTGTLTEGKPQVAAVYCVPDSGFDEDALYRIAAAVEQNAAHPLARAIVSAAQARGLEIPTAQNAQTIVGAGITAEVKGAGLVKAGKAEFAELTLPKFSDGVWEIASVVAVSVNGKPIGAFALADALKADTAEAIGRLKKHNIDVYIMSGDNQGTVEYVAKQLGIAHAFGNMSPRDKAAEVQKLKAAGKTVAMVGDGINDAPALAAANVSFAMKGGADVAEHTASATLMQHSVNQLADALSVSRATLKNIKQNLFFAFFYNILGIPLAALGFLNPVIAGAAMAASSVSVLSNALRLKRVKID

SEQ ID NO: 3583 - protein, 1551 aa, Neisseria
ATGAAAAAACCTTTGATTTCAGTTGCGGCAGTATTGCTCGGCGTTGCTTTGGGTACACCTTATTATTTGGGTGTCAAAGCAGAAGAAAGTCTGACGCAGCAGCAAAAAATATTGCAGAAAACGGGCTTTTTGACCGTCGAATCGCACCAGTATGATCGAGGCTGGTTTACCTCTACGGAAACGACGGTCATCCGTCTGAAACCCGAGTTGCTGCATAATGCGCAGAAATACCTGCCGGATAACTTGAAAATAGTGTTGGAACAGCCGGTTACGCTGGTAAACCATATCACGCACGGCCCTTTCGCCGGCGGATTCGGCACGCAGGCGCACATTGAAACCGAGTTCAAATACGCGCCTGAAACGGAAAAAGTTTTGGAACGCTTTTTTGGGAAACAAGTTCCGGTTTCCCTTGCCAATACCGTTTATTTCAACGGCAGCGGTAAAATGGAAGTCAGTGTTCCCGCTTTCGATTATGAAGAACTGTCGGGCATCAGGCTGCACTGGGAAGGCCTGACGGGGGAAACGGTTTATCAAAAAGGTTTCAAAAGCTACCGCAACAGCTATGATGCGCCCTTGTTCAAAATCAAGCTGGCAGACAAAGGCGATGCCGCGTTTGAAAAAGCGCATTTCGATTCGGAAACTTCAGACGGCATCAATCCGCTTGCTTTGGGCAGCAGCAATCTGACTTTGGAAAAATTTTCGCTCGAATGGAAAGAGGGTGTCGATTACAACGTCAAATTGAACGAACTGGTCAACCTCGTTACCGATTTGCAGATCGGCGCGTTTATCAATCCCAACGGCAGCATCGCACCTTCCAAAATCGAAGTCGGCAAGCTGGCTTTTTCAACCAAGACCGGGGAATCGGGCGCGTTTATCGACAGCGAAGGGCGGTTCCGTTTCGATACGTTGGTGTACGGCGATGAAAAATACGGCCCGCTGGACATCCATATCGCTGCCGAACACCTCGATGCTTCTGCCTTAACCGTATTGAAACGCAAGTTTGCACAAATTTCTGCCAAAAAAATGACTGAGGAACAAATCCGCAATGATTTGATTGCGGCAGTCAAAGGCGATGCTTCCGGATTATTTACCCATGACCCGGTACTAAATATCAAAATTTTCCGTTTCACCCTGCCTCAGGGAAAAATTGATGTGGGCGGAAAAATCATGTTTAAAGGCATGAAGAAGGAAGATTTGAACCAATTGGGACTGATGTTAAAGAAAACCGAGGCAAACATCAGAATGAGTATTCCTCAAAAAATGTTGGAAGATTTGGCGGTAAGTCAGGCTGGAAATATTTTCAGTGTAAATGCCGAAGATGAGGCGGAAGCCAGAGCAAGCATTGCCGATATTAATGAAACATTGCGCCTGATGGTGGACAGTACGGTCCAAAGTATGGCAAGGGAAAAATATCTTACTTTAGACGGTAATCAGATTGATACGGTCATTTCCCTTAAAAACAACGCCCTGAAGTTAAACGGGAAAACGCTGCAAAATGAACCCGATCCTGATTTTGACGAGGGAGATATGGTTTCCGGCCAGCCGCATTAA

SEQ ID NO: 3584 - protein, 516 aa, Neisseria
MKKPLISVAAVLLGVALGTPYYLGVKAEESLTQQQKILQKTGFLTVESHQYDRGWFTSTETTVIRLKPELLHNAQKYLPDNLKIVLEQPVTLVNHITHGPFAGGFGTQAHIETEFKYAPETEKVLERFFGKQVPVSLANTVYFNGSGKMEVSVPAFDYEELSGIRLHWEGLTGETVYQKGFKSYRNSYDAPLFKIKLADKGDAAFEKAHFDSETSDGINPLALGSSNLTLEKFSLEWKEGVDYNVKLNELVNLVTDLQIGAFINPNGSIAPSKIEVGKLAFSTKTGESGAFIDSEGRFRFDTLVYGDEKYGPLDIHIAAEHLDASALTVLKRKFAQISAKKMTEEQIRNDLIAAVKGDASGLFTHDPVLNIKIFRFTLPQGKIDVGGKIMFKGMKKEDLNQLGLMLKKTEANIRMSIPQKMLEDLAVSQAGNIFSVNAEDEAEARASIADINETLRLMVDSTVQSMAREKYLTLDGNQIDTVISLKNNALKLNGKTLQNEPDPDFDEGDMVSGQPH

SEQ ID NO: 3585 - protein, 462 aa, Neisseria
  VARIANT (1)...(462): Xaa = Any Amino Acid
WFTSMETTVIRLKPELLNNARKYLPDNLKTVLEQPVTLVNHITHGPFAGGFGTQAYIETEFKYAPETEKVLERFFGKQVPASLANTVYFNGSGKMEVSVPAFDYEELSGIXLHWEXLTGETVYQKGFKSYRNGYDAPLFKIKLADKGDAAFEKVHFDSETSDGINPLALGSSNLTLEKFSLEWKEGVDYNVKLNELVNLVTDLQIGAFINPNGSIAPSKIEVGKLAFSTKTGESGAFINSEGQFRFDTLVYGDEKYGPLDIHIAAEHLDASALTVLKRKFAQISAKKMTEEQIRNDLIAAVKGEASGLFTNNPVLDIKTFRFTLPSGKIDVGGKIMFKDMKKEDLNQLGLMLKKTEADIRMSIPQKMLEDLAVSQAGNIFSVNAEDEAEGRASLDDINETLRLMVDSTVQSMAREKYLTLNGDQIDTAISLKNNQLKLNGKTLQNEPEPDFDEGGMVSEPQQ

SEQ ID NO: 3586 - protein, 516 aa, Neisseria
MKKPLISVAAALLGVALGTPYYLGVKAEESLTQQQKILQEAGFLTVESHQYERGWFTSTETTVIRLKPELLHNAQKYLPDNLKTVLEQPVTLVNHITHGPFAGGFGTQAYIETEFKYAPETEKVLERFFGKQVPVSLANTVYFNGSGKMEVSVPAFDYEELSGIRLHWEGLTGETVYQKGFKSYRNGYDAPLFKIKLADKGDAAFEKVHFDSETSDGINPLALGSSNLTLEKFSLEWKEGVDYNVKLNELVNLVTDLQIGAFINPNGSIAPSKIEVGKLAFSTKTGESGAFIDSEGQFRFGTLVYGDEKYGPLDIHIAAEHLDASALTVLKRKFARISAKKMTEEQIRNDLIAAVKGEASGLFTHNPVLDIKTFRFTLPSGKIDVGGKIMFKDMKKEDLNQLGLMLKKTEADIRMSIPQKMLEDLAVSQAGNIFSVNAEDEAEGRASLDDINETLRLMVDSTVQSMAREKYLTLNGDQIDTAISLKNNQLKLNGKTLQNEPEPDFDEGGMVSEPQQ

SEQ ID NO: 3587 - protein, 516 aa, Neisseria; identical to SEQ ID NO: 1893

SEQ ID NO: 3588 - protein, 446 aa, Neisseria
LQTLLAFIFAILILVSLHEFGHYIVARLCGVKVVRFSVGFGKPFFTRKRGDTEWCLAPIPLGGYVKMVDTREGEVSEADLPYAFDKQHPAKRIAIVAAGPLTNLALAVLLYGLSFSFGVTELRPYVGTVEPDTVAARTGFQSGDKIQSVNGVSVQDWSSAQTEIVLNLEAGKVAVGVQTASGAQTVRTIDAAGTPEAGKIAKNQGYIGLMPFKITTVAGGVEKGSPAEKAGLKPGDRLTAADGKPIASWQEWANLTRQSPGKKITLTYERAGQTHTADIRPDTVEQPDHTLIGRVGLRPQPDRAWDAQIRRSYRPSVVRAFGMGWEKTVSHSWTTLKFFGKLISGNASVSHISGPLTIADIAGQSAELGLQSYLEFLALVSISLGVLNLLPVPVLDGGHLVFYTVEWIRGKPLGERVQNIGLRFGLALMMLMMAAAFFNDVTRLIG

SEQ ID NO: 3589 - protein, 446 aa, Neisseria
LHTLLAFIFAILILVSLHEFGHYIVARLCGVKVVRFSVGFGKPFFTRKRGDTEWCLAPIPLGGYVKMVDTREGEVSEADLPYAFDKQHPAKRIAIVAAGPLTNLALAVLLYGLSFSFGVTELRPYVGTVEPDTIAARAGFQSGDKIQSVNGTPVADWGSAQTEIVLNLEAGKVAVGVQTASGAQTVRTIDAAGTPEAGKIAKNQGYIGLMPFKITTVAGGVEKGSPAEKAGLKPGDRLTAADGKPIASWQEWANLTRQSPGKKITLNYERAGQTHTADIRPDTVEQSDHTLIGRVGLRPQPDRAWDAQIRRSYRPSVVRAFGMGWEKTVSHSWTTLKFFGKLISGNASVSHISGPLTIADIAGQSAELGLQSYLEFLALVSISLGVLNLLPVPVLDGGHLVFYTAEWIRGKPLGERVQNIGLRFGLALMMLMMAVAFFNDVTRLLG

SEQ ID NO: 3590 - protein, 446 aa, Neisseria
LHTLLAFIFAILILVSLHEFGHYIVARLCGVKVVRFSVGFGKPFFTRKRGDTEWCLAPIPLGGYVKMVDTREGEVSEADLPYAFDKQHPAKRIAIVAAGPLTNLALAVLLYGLSFSFGVTELRPYVGTVEPDTIAARAGFQSGDKIQSVNGTPVADWGSAQTEIVLNLEAGKVAVGVQTASGAQTVRTIDAAGTPEAGKIAKNQGYIGLMPFKITTVAGGVEKGSPAEKAGLKPGDRLTAADGKPIASWQEWANLTRQSPGKKITLTYERAGQTHTADIRPDTVEQPDHTLIGRVGLRPQPDRAWDAQIRRSYRPSVVRAFGMGWEKTVSHSWTTLKFFGKLISGNASVSHISGPLTIADIAGQSAELGLQSYLEFLALVSISLGVLNLLPVPVLDGGHLVFYTAEWIRGKPLGERVQNIGLRFGLALMMLMMAVAFFNDVTRLLG

SEQ ID NO: 3591 - protein, 237 aa, Neisseria
MIPDVFGQIFSGAFKFDAAAGGLLGGLISQTMMMGIKRGLYSNEAGMGSAPNAAAAAEVKHPVSQGMIQMLGVFVDTIIVCSCTAFIILIYQQPYGDLSGAALTQAAIVSQVGQWGAGFLAVILFMFAFSTVIGNYAYAESNVQFIKSHWLITAVFRMLVLAWVYFGAVANVPLVWDMADMAMGIMAWINLVAILLLSPLAFMLLRDYTAKLKMGKDPEFKLSEHPGLKRRIKSDVW

SEQ ID NO: 3592 - protein, 237 aa, Neisseria; identical to SEQ ID NO: 3591

SEQ ID NO: 3593 - protein, 237 aa, Neisseria; identical to SEQ ID NO: 3591

SEQ ID NO: 3594 - protein, 313 aa, Neisseria
MLELNGLCKCFGGKTVADNICLTVGRGKILAVLGRSGCGKSTLLNMIAGIVRPDGGEIRLNGENITCMPPEKRRISLMFQDYALFPHMSALENTAFGLKMQKMPKAEAERLALSALAEVGLENEAHRKPEKLSGGEKQRLALARALVVRPSLLLLDESFSSLDTHLRDRLRRMTAERIRKGGIPAVLVTHSPEEACTAADEIAVMHEGKILQCGTPETLIQTPAGVQVARLMGLPNTDDDRHIPQNAVCLDNHGTECRLLSLVRLPDSLRLSAVHPEHGELTLNLTVGQHTDGISGNGTVRIRVDEGRIVRFR

SEQ ID NO: 3595 - protein, 312 aa, Neisseria; identical to SEQ ID NO: 2557

SEQ ID NO: 3596 - protein, 312 aa, Neisseria
  VARIANT (1)...(312): Xaa = Any Amino Acid
MLELNGLCKRFGGKTVADDICLTVGRGKILAVLGRSGCGKSTLLNMIAGIVRPDGGEIWLNGENITRMPPEKRRISLMFQDYALFPHMSALENAAFGLKMQKMPKAEAESLAMAALAEVGLENEAHRKPXKLSGGEKQRLALARALVVRPSLLLLDESFSSLDTHLRDRLRRMTAERIRKGGIPAVLVTHSPEEACTAADEIAVMHEGKILQCGTPETLVQTPAGVQVAHLMGLPNTDDDRHIPQHAVRFDQDGMECRVLSRTCLPESFSLSVLHPEHGILWLNLDMPHAGEISGNDTVRIHIEDREIVRFR

SEQ ID NO: 3597 - protein, 158 aa, Neisseria
MGADTDGDKDVRLNRTGLVFSILRLLFRIGIGIGKFAVQAFQVFKLLICTVEHPNRFALPLGGQQLTRFDFTDIHLDGSTGGLGFFRREKTGHKRRCHTQCCHSARAAGRKCQETAAAVVDFLIIHYSVVLIFWECRAIKHCNFTQFAVILKALFKIR

SEQ ID NO: 3598 - protein, 158 aa, Neisseria
MGADTDGDKDVRLNRTGLVFSILRLLFRIGIGIGKFAVQAFQVFKLLICTVEHPNRFALPLGGQQLTRFDFTDIHLDGSTGGLGFFRREKTGHKRRCHTQCCHSARAAGRECQETAAAVVDFLIIHYSVVLIFWEYRAIKRCNFTQFAVILKALFKIR

SEQ ID NO: 3599 - protein, 158 aa, Neisseria; identical to SEQ ID NO: 3598

SEQ ID NO: 3600 - protein, 388 aa, Neisseria
MRKFNLTALSVMLALGLTACQPPEAEKAAPAASGETQSANEGGSVGIAVNDNACEPMNLTVPSGQVVFNIKNNSGRKLEWEILKGVMVVDERENIAPGLSDKMNRNLLPGEYEMTCGLLTNPRGKLVVADSGFKDTANEADLEKLPQPLADYKAYVQGEVKELAAKTKTFTEAVKAGDIEKAKSLFAATRVHYERIEPIAELFSELDPVIDACEDDFKDGAKDAGFTGFHRIEHALWVEKDVSGVKETAAKLMTDVEALQKEIDALAFPPGKVVGGASELIEEAAGSKISGEEDRYSHTDLSDFQANADGSKKIVDLFRPLIEAKNKALLEKTDTNFKQVNEILAKYRTKDGFETYDKLSEADRKALQAPINALAEDLAQLRGILGLK

SEQ ID NO: 3601 - protein, 388 aa, Neisseria; identical to SEQ ID NO: 636

SEQ ID NO: 3602 - protein, 388 aa, Neisseria
MRKFNLTALSVMLALGLTACQPPEAEKAAPAASGEAQTANEGGSVSIAVNDNACEPMELTVPSGQVVFNIKNNSGRKLEWEILKGVMVVDERENIAPGLSDKMTVTLLPGEYEMTCGLLTNPRGKLVVTDSGFKDTANEADLEKLSQPLADYKAYVQGEVKELVAKTKTFTEAVKAGDIEKAKSLFADTRVHYERIEPIAELFSELDPVIDAREDDFKDGAKDAGFTGFHRIEYALWVEKDVSGVKEIAAKLMTDVEALQKEIDALAFPPGKVVGGASELIEEVAGSKISGEEDRYSHTDLSDFQANVDGSKKIVDLFRPLIETKNKALLEKTDTNFKQVNEILAKYRTKDGFETYDKLGEADRKALQASINALAEDLAQLRGILGLK

SEQ ID NO: 3603 - protein, 373 aa, Neisseria
MLLLDEPTNHLDAESVEWLEQFLVRFPGTVVAVTHDRYFLDNAAEWILELDRGHGIPWKGNYSSWLEQKEKRLENEAKSEAARVKAMKQELEWVRQNAKGRQAKPKARLARFEEMSNYEYQKRNETQEIFIPVAERLGNEVIEFVNVSKSFGDKVLIDGLSFKVPAGAIVGIIGPNGAGKSTLFKMIAGKEQPDSGEVKIGQTVKMSLIDQSREGLQNDKTVFDNIAEGRDILQVGQFEIPARQYLGRFNFKGSDQSKIARQLSGGERGRLHLAKTLLGGGNVLLLDEPSNDLDVETLRALEDALLEFAGSVMVISHDRWFLDRIATHILACEGDSKWVFFDGNYQEYEADKKRRLGKEGAKPKRIKYKPVTR

SEQ ID NO: 3604 - protein, 558 aa, Neisseria; identical to SEQ ID NO: 969

SEQ ID NO: 3605 - protein, 558 aa, Neisseria
MSQQYVYSMLRVSKVVPPQKTIIKDISLSFFPGAKIGLLGLNGAGKSTVLRIMAGVDKEFEGEAVPMGGIKIGYLPQEPELDPEKTVREEVESGLGEVAAAQKRLEEVYAEYANPDADFDALAEEQGRLEAIIAAGSSTGGGAEHELEIAADALRLPEWDAKIDNLSGGEKRRVALCKLLLSKPDMLLLDEPTNHLDAESVEWLEQFLVRFPGTVVAVTHDRYFLDNAAEWILELDRGHGIPWKGNYSSWLEQKEKRLENEAKSEAARVKAMKQELEWVRQNAKGRQAKSKARLARFEEMSNYEYQKRNETQEIFIPVAERLGNEVIEFVNVSKSFGDKVLIDDLSFKVPAGAIVGIIGPNGAGKSTLFKMIAGKEQPDSGEVKIGQTVKMSLIDQSREGLQNDKTVFDNIAEGRDILQVGQFEIPARQYLGRFNFKGSDQSKITGQLSGGERGRLHLAKTLLGGGNVLLLDEPSNDLDVETLRALEDALLEFAGSVMVISHDRWFLDRIATHILACEGDSKWVFFDGNYQEYEADKKRRLGEEGTKPKRIKYKPVTR

SEQ ID NO: 3606 - protein, 389 aa, Neisseria
MLLHVSNSLKQLQEERIRQERIRQERIRQARGNLASVNRKQREAWDKFQKLNTELNRLKTEVAATKAQISRFVSGNYKNSRPNAVALFLKNAEPGQKNRFLRYTRYVNASNREVVKDLEKQQKALAVQEQKINNELARLKKIQANVQSLLKKQGVTDAAEQTESRRQNAKISKDARKLLEQKGNEQQLNKLLSNLEKKKAEHRIQDAEAKRKLAEAKLAAAEKARKEAAQQKAEARRAEMSNLTAEDRNIQAPSVMGIGSADGFSRMQGRLKKPVDGVPTGLFGQNRSGGDVWKGVFYSTAPATVESIAPGTVSYADELDGYGKVVVIDHGENYISIYAGLSEISAGKGYTVAAGSKIGTSGSLPDGEEGLYLQIRYRGQVLNPSGWIR

SEQ ID NO: 3607 - protein, 384 aa, Neisseria
MLLHVSNSLKQLQEERIRQERIRQARGNLASVNRKQREAWDKFQKLNTELNRLKTEVAATKAQISRFVSGNYKNSQPNAVALFLKNAEPGQKNRFLRYTRYVNASNREVVKDLEKQQKALAVQEQKINNELARLKKIQANVQSLLKKQGVTDAAEQTESRRQNAKIAKDARKLLEQKGNEQQLNKLLSNLEKKKAEHRIQDAEAKRKLAEARLAAAEKARKEAAQQKAEARRAEMSNLTAEDRNIQAPSVMGIGSADGFSRMQGRLKKPVDGVPTGLFGQNRSGGDIWKGVFYSTAPATVESIAPGTVSYADELDGYGKVVVVDHGENYISIYAGLSEISVGKGYMVAAGSKIGSSGSLPDGEEGLYLQIRYQGQVLNPSSWIR

SEQ ID NO: 3608 - protein, 389 aa, Neisseria
MLLHVSNSLKQLQEERIRQERIRQERIRQARGNLASVNRKQREAWDKFQKLNTELNRLKTEVAATKAQISRFVSGNYKNSQPNAVALFLKNAEPGQKNRFLRYTRYVNASNREVVKDLEKQQKALAVQEQKINNELARLKKIQANVQSLLKKQGVTDAAEQTESRRQNAKIAKDARKLLEQKGNEQQLNKLLSNLEKKKAEHRIQDAEAKRKLAEARLAAAEKARKEAAQQKAEARRAEMSNLTAEDRNIQAPSVMGIGSADGFSRMQGRLKKPVDGVPTGLFGQNRSGGDVWKGVFYSTAPATVESIAPGTVSYADELDGYGKVVVVDHGENYISIYAGLSEISVGKGYMVAAGSKIGSSGSLPDGEEGLYLQIRYQGQVLNPSSWIR

SEQ ID NO: 3609 - protein, 203 aa, Neisseria
MFPTGNLVDEIDVPNIGRLKATLINAGIPTVFLNAADLGYTGKELQDDINNDAAALEKFETIRAYGALKMGLISDVSEAAARARTPKPAFVAPAADYTASSGKTVNAADIDLPVRALSMGKLHHAMMGIASVAIAAAVLGTLVNLAAGGGTRKEVRFGHPSGTLRVGAAAECQDGQWTAAKAVMSRSARVIMESWVRVPDDCF

SEQ ID NO: 3610 - protein, 205 aa, Neisseria
MFPTGNLVDEIDVPNIGRLKATLINAGIPTVFLNAADLGYTGKELQDDINNDAAALEKFEKIRAYGALKMGLISDVSEAAARAHTPKVAFVAPAADYTASSGKTVNAADIDLLVRALSMGKLHHAMMGTASVAIATAAAVPGTLVNLAAGGGTRKEVRFGHPSGTLRVGAAAECQDGQWTATKAVMSRSARVMMEGWVRVPEDCF

SEQ ID NO: 3611 - protein, 205 aa, Neisseria; identical to SEQ ID NO: 3610

SEQ ID NO: 3612 - protein, 115 aa, Neisseria
MLLHQCDKARHMRPFLLGGQINRHRQASNRGLCSFGGFQGNREAQVFNADLIDRQVAQISAGLHVCNGVHALFVLNIQIIIEMCVLYGRQMPSEKTLSAACLQMRDYITCFWRLH

SEQ ID NO: 3613 - protein, 110 aa, Neisseria
MLLHQCDKTRHMRPLLLSRQVNRHGQTGNGGLDAFCSLQGNRKAQVFDTDLIDRQIAQISAGLHVCNSVHELFFLNIHVIVEMCAWYGVSAGEYTVNLQMRDYITRFQLH

SEQ ID NO: 3614 - protein, 110 aa, Neisseria
MLLHQCDKARHMRTLLLGRQVNRHGQTGNCGLDAFCSLQGNRKAQVFDTDLIDRQIAQISAGLHVCNSVHELFFLNIHVIVEMCAWYGVSTGEYTVNLQMRDYITRFQLH

SEQ ID NO: 3615 - protein, 449 aa, Neisseria
MDSRLRGNDARKYGIRFAQRGRLKHTPPNAHPFSDGPAPKKQPQTTRRNIMSDQLILVLNCVSSSLKGAVIDRKSGSVVLSCLGERLTTPEAVITFNKDGNKRQVPLSGRNCHAGAVGMLLNELEKHGLHDRIKAIGRRIAHGGEKYHESVLIDQDVLDELKACIPFAPLHNPANISGILAAQEHFPGLPNVGVMDTSFHQTMPERAYTYAVPRELRKKYAFRRYGFHGTGMRYVAPEAARILGKPLEDIRMIIAHLGNGASITAVKNGKSVDTGMGFTPIEGLVMGTRCGDTDPGVYSYPTFHAGMDVAQVDEMLNEKSGFPGISELPNDCRTLEIAADEGREGARLALEVMTCRLAKYIASMAVACGSVDALVFTGGIGENSRNIRAKTVSYLDFLGLHIDTKANMEKRYGNSGIISPTDSSPAVLVVPTNEELMIACDTAELAGIL

SEQ ID NO: 3616 - protein, 450 aa, Neisseria
  VARIANT (1)...(450): Xaa = Any Amino Acid
LSSRRRGRNNDRKCGIRFAQRGRLKHLAPDVCXFSDDPTLKKQPQTTRRNIMSDQLILVLNCGSSSLKGAVIDRXSGSVVLSCLGERLTTPEAVITFNKDGNKRQVPLSGRNCHAGAVGMLLNELEKHGLHDRIKAIGHRIAHGGEKYSESVLIDQAVMDELNACIPLAPLHNPANISGILAAQEHFPGLPNVGVMDTSFHQTMPERAYTYAVPRELRKKYAFRRYGFHGTSMRYVAPEAARILGKPLEDIRMIIAHLGNGASITAIKNGKSVDTSMGFTPIEGLVMGTRCGDIDPGVYSYLTSHAGMDVAQVDEMLNKKSGLLGISELSNDCRTLEIAADEGHEGARLALEVMTYRLAKYIASMAVGCGGVDALVFTGGIGENSRNIRAKTVSYLDFLGLHIDTKANMEKRYGNSGIISPTDSSPAVLVVPTNEELMIACDTAELAGIL

SEQ ID NO: 3617 - protein, 450 aa, Neisseria
  VARIANT (1)...(450): Xaa = Any Amino Acid
LSSRRRGRNNDRKCGIRFAQRGRLKHTPPNAHPFSDDPTXKKQPQTTRRNIMSDQLILVLNCGSSSLKGAVIDRKSGSVVLSCLGERLTTPEAVITFSKDGNKRQVPLSGRNCHAGAVGMLLNELEKHELHDRIQAVGHRIAHGGEKYSESVLIDQAVMDELNACIPLAPLHNPANISGILAAQEHFPGLPNVGVMDTSFHQTMPERAYTYAVPRELRKKYAFRRYGFHGTSMRYVAPEAACILGKPLEDIRMIIAHLGNGASITAIKNGKSVDTSMGFTPIEGLVMGTRCGDIDPGVYSYLTSHAGLDVAQVDEMLNKKSGLLGISELSNDCRTLEIAADEGHEGARLALEVMTYRLAKYIASMAVGCGGVDALVFTGGIGENSRNIRAKTVSYLDFLGLHIDTKANMEKRYGNSGIISPTDSSPAVLVVPTNEELMIACDTAELVGIL

SEQ ID NO: 3618 - protein, 167 aa, Neisseria
MPEAHFFTRSAACGKVDQRTEHGGGDGDRGDAHHSVVQFAHAQGAYRQIDVGGVYGFAAGGGVIGGGRDEGGFRRARAGGGFGYVADQTHFQRAICADGFKFFQRGGIVVDVVLQLFARVAQVGGVQENGRNARVDERGFQTTYIRHINFVDQIAGWEHTAFAVGWI

SEQ ID NO: 3619 - protein, 169 aa, Neisseria
MPEAHFFTRSAACGKVDQRTGYGGGGRNGNRGGTHHRVVQFAHAQGAYQQIDVGGVHGFATGGGVIGGGRDEGDFRRVRASGSFGYVADQTHFQRTVSADFLEFFQSRGIVVDVVLQLFACVAQVGGIQENGRNARVDERGFQTAYIRHINFIDQIAGWEHTAFAVGWI

SEQ ID NO: 3620 - protein, 220 aa, Neisseria
MPEAHFFTRSAACGKVDQRTGHGGGGRNGNRGGTHHRVVQFAHAQGAYQQIDVGGIHGFATGGGVIGGGRDEGDFRRVRAGGSFGYVADQTHFQRTVSADFLEFFQSCGIVVDVVLQLFARVAQVGGIQENGRNARVDERGFQTAYIRHINFIDQIAGWEHTAFAVGWIKKFDLYFGCRERYAVELKIACFQNCAVLHRYMGNNGFADVFLPDFDCADAV

SEQ ID NO: 3621 - protein, 514 aa, Neisseria
MMTEMQQRAQLHRQIWKIADEVRGAVDGWDFKQYVLGTLFYRFISENFTDYMQAGDSSIDYAAMPDSIITPEIKDDAVKVKGYFIYPGQLFCNIAAEAHQNEELNTKLKEIFTAIESSASGYPSEQGIKGLFDDFDTTSSRLGSTVADKNKRLAAVLKGVAELDFGNFEDHRIDLFGDAYEYLISNYAANAGKSGGEFFTPQSVSKLIARLAVHGQEKVNKIYDPACGSGSLLLQAKKQFDEHIIEEGFFGQEINHTTYNLARMNMFLHNVNYNKFHIELGDTLTNPKLKDSKPFDAVVSNPPYSIDWIGSDDPTLINDDRFAPAGVLAPKSKADFAFILHALNYLSGRGRAAIVSFPGIFYRGGAEQKIRQYLVEGNYVETVIALAPNLFYGTCIAVNILVLSKHKDNTDIQFIDASGFFKKETNNNVLTEEHIAEIVKLFADKADVPHIAQNAAQQTVKDNGYNLAVSSYVEAEDTREVIDIRQLNAEISETVAKIERLRREIDEVIAEIET

SEQ ID NO: 3622 - protein, 514 aa, Neisseria; identical to SEQ ID NO: 1403

SEQ ID NO: 3623 - protein, 514 aa, Neisseria
MMTEIQQRAQLHRQIWKIADEVRGAVDGWDFKQYVLGTLFYRFISENFTDYMQAGDSSIDYAAMPDSIITPEIKDDAVKVKGYFIYPGQLFCNIAAEAHQNEELNTKLKEIFTAIESSASGYPSEQDIKGLFDDFDTTSSRLGSTVADKNKRLAAVLKGVAELDFGSFEDHHIDLFGDAYEYLISNYAANAGKSGGEFFTPQSVSKLIARLAVHGQEKVNKIYDPACGSGSLLLQAKKQFDEHIIEEGFFGQEINHTTYNLARMNMFLHNVNYNKFHIELGDTLTNPKLKDSKPFDAVVSNPPYSINWIGSGDPTLINDDRFAPAGVLAPKSKADFAFILHALNYLSGRGRAAIVSFPGIFYRGGAEQKIRQYLVEGNYVETVIALAPNLFYGTGIAVNILVLSKHKDNTDIQFIDAGGFFKKETNNNVLTEEHIAEIVKLFADKADVPHIAQNAAQQTVKDNGYNLAVSSYVEPEDTREIIDIKQLNAEISETVAKIERLRREIDEVIAEIEA

SEQ ID NO: 3624 - protein, 226 aa, Neisseria
MSKFIAKQSVGAEVIDTPRTEEEAWLLNTVEAQARQWNLKTPEVAIYHSPEPNAFATGASRNSSLIAVSTGLLDHMTRDEVEAVLAHEMAHVGNGDMVTLTLIQGVVNTFVVFLSRIIANLIARNNDGSQSQGTYFLVSMVFQILFGFLASLIVMWFSRQREYRADAGAAKLVGAPKMISALQRLKGNPVDLPEEMNAMGIAGDTRDSLLSTHPSLDNRIARLKSL

SEQ ID NO: 3625 - protein, 226 aa, Neisseria; identical to SEQ ID NO: 3624

SEQ ID NO: 3626 - protein, 226 aa, Neisseria; identical to SEQ ID NO: 3624

SEQ ID NO: 3627 - protein, 459 aa, Neisseria
MLLDLDRFSFSVFLKEIRLLTALALPMLLAQVAQVGIGFVDTVMAGGAGKEDLAAVALGSSAFATVYITFMGIMAALNPMIAQLYGAGKTGEAGETGRQGIWFGLILGIFGMILMWAAITPFRNWLTLSDYVEGTMAQYMLFTSLAMPAAMVHRALHAYASSLNRPRLIMLVSFAAFVLNVPLNYIFVYGKFGMPALGGAGCGVATMAVFWFSALALWIYIAKEKFFRPFGLTAKFGKPDWAVFKQIWKIGAPIGLSYFLEASAFSFIVFLIAPFGEDYVAAQQVGISLSGILYMIPQSVGSAGTVRIGFSLGRREFSRARYISGVSLVSGWVLAVITVLSLVLFRSPLASMYNDDPAVLSIASTVLLFAGLFQPADFTQCIASYALRGYKVTKVPMFIHAAAFWGCGLLPGYLLAYRFDMGIYGFWTALIASLTIAAVALVWCLEKYSMELVKSHKAV

SEQ ID NO: 3628 - protein, 459 aa, Neisseria; identical to SEQ ID NO: 1387

SEQ ID NO: 3629 - protein, 459 aa, Neisseria
MLLDLNRFSFSVFLKEVRLLTALALPMLLAQVAQVGIGFVDTVMAGGAGKEDLAAVALGSSAFATVYITFMGIMAALNPMIAQLYGAGKTDEVGETGRQGIWFGLFLGVFGMVLMWAAITPFRNWLTLSDYVEGTMAQYMLFTSLAMPAAMVHRALHAYASSLNRPRLIMLVSFAAFVLNVPLNYIFVYGKFGMPALGGAGCGLATMAVFWFSALALWIYIAKENFFRPFGLTAKFGKPDWAVFKQIWKIGAPIGLSYFLEASAFSFIVFLIAPFGEDYVAAQQVGISLSGILYMIPQSVGSAGTVRIGFSLGRREFSRARYISGVSLVSGWMLAVITVLSLVLFRSPLVSMYNNDPAVLSIAATVLLFAGLFQPADFTQCIASYALRGYKVTKVPMFIHAAAFWGCGLLPGYLLAYRFDMGIYGFWTALIASLTIAAIALVWCLELCSREMVRSHKAV

SEQ ID NO: 3630 - protein, 188 aa, Neisseria
MSALLPIINRLILQSPDSRSELTSFAGKTLTLNIAGLKLAGRITEDGLLSAGNGFADTEITFRNSAIRKILQGGEPGAGDIRLEGDLILGIAVLSLLGSLRSRASDELARIFGTQAGIGSRATDIGHGIKQIGRNIAEQIGGFSREPESANTGNEALADCLDEISRLRDGVERLNERLDRLERDIWID

SEQ ID NO: 3631 - protein, 188 aa, Neisseria; identical to SEQ ID NO: 1383

SEQ ID NO: 3632 - protein, 188 aa, Neisseria
MSALLPIINRLILQSPDSRSELAAFAGKTLTLNIAGLKLAGRITEDGLLSAGNGFADTEITFRNSAVQKILQGGEPGAGDIGLEGDLILGIAVLSLLGSLRSRASDELARIFGTQADIGSRAADIGHGIKQIGRNIAEQIGRFSREPESANIGNEALADCLDEISRLRDGVERLNERLDRLERDIWID

SEQ ID NO: 3633 - protein, 131 aa, Neisseria
MVVDRLEILALDDETLDAFVGNQRSSDIAHHIFHEFRVFVGLFGNVFFIGAFEQAVELAARLRFHIIDNFLDTDFGIGSQADGNVRTLIMRAILGNFFGTRAKRGYGNHDLHTVAVCPVFHFTREADIIIQ

SEQ ID NO: 3634 - protein, 131 aa, Neisseria
MVVDRLEILALDDETLDAFVGNQRSSDIAHHIFHEFRVFVGFFGNVFFIGAFEQAVELAARLRLHIIDDFLDTDFGIGSQADGNVRTLVVRAVLGNFFGTRAKRGYGNHDLHTVAVCPVFDFARETDIIIQ

SEQ ID NO: 3635 - protein, 131 aa, Neisseria
MVVDRLEILALDDETLDAFVGNQRSSDIAHHIFHEFRVFVGFFGNVFFIGAFEQAVELAARLRLHIIDDFLDTDFGIGSQADGNVRTLVVRAILGNFFGTRAKRGYGNHDLHTVAVCTVFHFAREADIIIQ

SEQ ID NO: 3636 - protein, 338 aa, Neisseria
MIGGLMQFPYRNVPASRMRRMRRDDFSRRLMREHMLTADDLIYPVFVLEGAAREEDVPSMPGVKRQSLDRLLFTAEEAVKLGIPMLALFPVVTANKTGRAQEAYNPEGLVPSTVRALRERFPELGIMTDVALDPYTVHGQDGLTDENGYVMNDETVEVLVKQALCHAEAGTQVVAPSDMMDGRIGAIREALEDAGHIHTRIMAYSAKYASAFYGPFRDAVGSSGNLGKADKKTYQMDPANTDEALHEVALDIQEGADMVMVKPGLPYLDVVRRVKDEFGVPTYAYQVSGEYAMLQAAVANGWLDGGKVVLESLLAFKRAGADGILTYYAIEAAKMLKR

SEQ ID NO: 3637 - protein, 338 aa, Neisseria
MIGGLMQFPYRNVPASRMRRMRRDDFSRRLMREHTLTADDLIYPVFVLEGSAREEDVPSMPGVKRQSLDRLLFTAEEAVKLGIPMLALFPVVTANKTERAQEAYNPEGLVPSTVRALRERFPELGIMTDVALDPYTVHGQDGLTDENGYVMNDETVEVLVKQALCHAEAGAQVVAPSDMMDGRIGAIREALEDAGHIHTRIMAYSAKYASAFYGPFRDAVGSSGNLGKADKKTYQMDPANTDEALHEVALDIQEGADMVMVKPGLPYLDVVRRVKDEFGVPTYAYQVSGEYAMLQAAIANGWLDGGKVVLESLLAFKRAGADGILTYYAIEAAKMLKR

SEQ ID NO: 3638 - protein, 338 aa, Neisseria
MIGGLMQFPYRNVSASRMRRMRRDDFSRRLMREHTLTADDLIYPVFVLEGSAREEDVPSMPGVKRQSLDRLLFTAEEAVKLGIPMLALFPVVTANKTERAQEAYNPEGLVPSTVRALRERFPELGIMTDVALDPYTVHGQDGLTDENGYVMNDETVEVLVKQALCHAEAGAQVVAPSDMMDGRIGAIREALEDAGHIHTRIMAYSAKYASAFYGPFRDAVGSSGNLGKADKKTYQMDPANTDEALHEVALDIQEGADMVMVKPGLPYLDVVRRVKDEFGVPTYAYQVSGEYAMLQAAVANGWLDGGKVVLESLLAFKRAGADGILTYYAIEAAKMLKR

SEQ ID NO: 3639 - protein, 180 aa, Neisseria
MPSENGMGKRQLAGCRLFGKLSLVFRLLPGLCRGGVCRGRCFGFFPSRSVRRVIFRRVRILAQVVAVILGRAGLFARHNFQYLIAVYGFPFHQGFAHRFHLVAVFIEDFVGNLILLVQNPADFRVDVLLGFLGNVLRTGYAAPQEDFAFVFRINHHAHFVAHAVARYHFACHLGCAFKVV

SEQ ID NO: 3640 - protein, 180 aa, Neisseria
MPSENGMGKRQLAGCRLFGKLSLVFRLLLGLCRSGVCRGRCFGFFPSRSVRRVIFRRVRILAQVVAVIFGRAGLFARHDFQYLIAVDGFPFHQGFAHRFHLVAVFIEDFVGNLILLVQNPADFRVDVLLGFLGNVLRTGYAASQEDFAFVFRINHHAHFVAHAVARYHFARHLGCAFKVV

SEQ ID NO: 3641 - protein, 180 aa, Neisseria
MPSENRMGKRQLAGCRLFGKLSLVFRLLLGLCRSGVCRGRCFGFFPSRSVRRVIFRRVRILAQVVAVIFGRAGLFARHDFQYLIAVDGFPFHQGFAHRFHLVAVFIEDFVGNLILLVQNPADFRIDVLLGFLGNVLRTGYAASQEDFAFVFRINHHAHFVAHAVARYHFARHLGCAFKVV

SEQ ID NO: 3642 - protein, 124 aa, Neisseria
MGFGGNIAKKLAGVDEIAFDFDGIVFDFGRDDAVRHSGVINAAVAGLHIVGEVFADKAVEKCAENVLFKVPAIHRAAYFVGDFPNLAVQLGALLHFGHHRNPYIKLNKSKSPDIFRRFFYGHSN

SEQ ID NO: 3643 - protein, 124 aa, Neisseria
  VARIANT (1)...(124): Xaa = Any Amino Acid
MGFGGNIAKKLAGVDEIAFNFDGIVFDFGRDDAVRHSGVINTAVACLHIVGEVFADKAVEKCAENVLFKVPAIHRAAYFVGNFPNLAVQLGALLHFGHHRNPYXKLNKSKSPDIFRRFFYGHSN

SEQ ID NO: 3644 - protein, 166 aa, Neisseria
  VARIANT (1)...(166): Xaa = Any Amino Acid
MISCFEATREXCANBEANYNATRALLYCCRRINGAMINACIDMGFGGNIAKKLAGVDEIAFDFDGIVFDFGRDDAVRHSGVINTAVACLHIVGKVFADKAVEKCAENVLFEVPAIHRAAYFVGNFPNLAVQLGALLYFGHHRNPYXKLNKSKSPDIFRRFFXGHSN

SEQ ID NO: 3645 - protein, 204 aa, Neisseria
MSRSSLSRRSLRRSTPSRSLLISSRQSARASLPVFADSGSRENPPICSAMFLPICLMPCPMSVARLPMPACVPKIRANSSDARERRLPSRDSTAMPRMRSPSSLMSPAPGSPPWRIFRIALLRKVISVSAKPFPAESKPSSVMRPASFSPAMFRVSVLPAKEVSSERLSGLCRIRRLMMGRRADIFSDWGGECLLLLLPLILQA

SEQ ID NO: 3646 - protein, 204 aa, Neisseria
MSRSSRSRRSLRRSTPSRSLLISSRQSARASLPMFADSDSRENPPICSAMFLPICLMPCPMSAARLPMSACVPKIRANSSDARERRLPSRDSTAMPRMRSPSSPMSPAPGSPPWRIFCTALLRKVISVSAKPFPAESKPSSVMRPASFSPAMFRVSVLPAKAASSERLSGLCRIRRLMMGRRADIFSDRGGECLLLLLPLILQA

SEQ ID NO: 3647 - protein, 204 aa, Neisseria
MSRSSRSRRSLRRSTPSRSLLISSRQSARASLPMFADSGSRENLPICSAMFLPICLMPCPMSAARLPMSACVPKIRANSSDARERRLPSRDSTAMPRMRSPSSPMSPAPGSPPWRIFCTALLRKVISVSAKPFPAESKPSSVMRPASFNPAMFRVSVLPAKAASSERLSGLCRIRRLMMGRRADIFSDRGGECLLLLLTLILQA

SEQ ID NO: 3648 - protein, 391 aa, Neisseria
  VARIANT (1)...(391): Xaa = Any Amino Acid
MAAFNALDGKKEDNGQIEYSQFIRQVNNGEVSGVNIEGSVVSGYLIKGERTDKSTFFTNAPLDDNLIQTLLNKNVRVKVTPEEKPSALTALFYSLLPVLLLIGAWFYFMRMQAGGGGKGGAFSFGKSRARLLDKDANKVTFADVAGCDEAKEEVQEIVDYLKAPNRYQSLGGRVPRGILLAGSPGTGKTLLAKAIAGEAGVPFFSISGSDFVEMFVGVGASRVRDMFEQAKKNAPCIIFIDEIDAVGRQRGAGLGGGNDEREQTLNQLLVEMDGFESNQTVIVIAATNRPDVLDPALQRPGRFDRQVVVPLPDIRGREQXLNVHSKKVPLDESVDLLSLARGTPGFSGADLAKLVNEAPLFAGRRNKVKVDQSDLKTPKTKSIWVRNAAVW

SEQ ID NO: 3649 - protein, 391 aa, Neisseria
MAAFNALDGKKEDNGQIEYSQFIQQVNNGEVSGVNIEGSVVSGYLIKGERTDKSTFFTNAPLDDNLIKTLLDKNVRVKVTPEEKPSALAALFYSLLPVLLLIGAWFYFMRMQTGGGGKGGAFSFGKSRARLLDKDANKVTFADVAGCDEAKEEVQEIVDYLKAPNRYQSLGGRVPRGILLAGSPGTGKTLLAKAIAGEAGVPFFSISGSDFVEMFVGVGASRVRDMFEQAKKNAPCIIFIDEIDAVGRQRGAGLGGGNDEREQTLNQLLVEMDGFESNQTVIVIAATNRPDVLDPALQRPGRFDRQVVVPLPDIRGREQILNVHSKKVPLDESVDLLSLARGTPGFSGADLANLVNEAALFAGRRNKVKVDQSDLKTPKTKSIWVRNAAVW

SEQ ID NO: 3650 - protein, 391 aa, Neisseria
MAAFNALDGKKEDNGQIEYSQFIQQVNNGEVSGVNIEGSVVSGYLIKGERTDKSTFFTNAPLDDNLIKTLLDKNVRVKVTPEEKPSALAALFYSLLPVLLLIGAWFYFMRMQTGGGGKGGAFSFGKSRARLLDKDANKVTFADVAGCDEAKEEVQEIVDYLKAPNRYQSLGGRVPRGILLAGSPGTGKTLLAKAIAGEAGVPFFSISGSDFVEMFVGVGASRVRDMFEQAKKNAPCIIFIDEIDAVGRQRGAGLGGGNDEREQTLNQLLVEMDGFESNQTVIVIAATNRPDVLDPALQRPGRFDRQVVVPLPDIRGREQILNVHSKKVPLDKSVDLLSLARGTPGFSGADLANLVNEAALFAGRRNKVKVDQSDLKTPKTKSIWVRNAAVW

SEQ ID NO: 3651 - protein, 371 aa, Neisseria
MWKRRRRGVGSFEEQRIDAAGKPQCGKQAEAVARQLHAASSSSHVWQILDRRRNLPPRAASMSRHCATSSADGASSMLHSYSRKSRVSSMTGMDSVWISCLSSFMTVRIRKSGKCRLKGLQTALDYLLCRKRVASSHLPEMMSGTACRDLATASSICRRCFRARFVQDVADDEVAVAGVADAEAQAVIVCRAEFCLNVFQAVVSAVAAAEFEFDPSARDVEFVVDDEDFFGFDFVELCKRGNRLSGTVHERGRFEQPNIAVGQGGAGNFAEEFFFFFKRSLPFPRQFVEEPKARIVAGLFVFFARVAQADNHFDCVRHDIFRVSVECGLKASDGMVILLDFERVCGALLWGRSTAGGTLRCGRRRAAACRL

SEQ ID NO: 3652 - protein, 371 aa, Neisseria
  VARIANT (1)...(371): Xaa = Any Amino Acid
MRKRRWRGFGSFEKQXVNAACKPQCREQDKAVAWQIHACSSSSHVWHSLDRRRNFPPRAASISRQTAISSAEGASSMLHSXSRKSRVSSMTGMDSVWISCLSSVMTVRIWKSGTCRLKGLQTASGHLLCRKRVASSHLPARMSGMACRDLATASSICRRCXRTGFVQDIADDEVAVARVADAEAQAVIVCRAEFCLNVFQAVVSAVAAAEFEFDPSAGNVEFVVDDEDFFGFDFVELCKRGNCLSGTVHERGRFEQPNVAVGQGGTGDFAEEFFFFFKXSLPFPRQFVEEPKTRIVACLFVFFARVAQADNHFDCVXHDIFRVSVECCLKASDGMVILLDFERVCGALLWGRSTAGGTLRCGRRRAAACRL

SEQ ID NO: 3653 - protein, 369 aa, Neisseria
  VARIANT (1)...(369): Xaa = Any Amino Acid
MRKRRRRGVGSFEEQRIDAAGKPQCGKQAEAVARQLHAASSSSHVWQILDRRRNLPPRAASMSRHCATSSADGASSMLHSYSRKSRVSSMTGMDSVWISCLSSVMTVRIWKSGTCRLKGLQTASGHLLCRKRVASSHLPARMSGMACRDLATASSICRRXFRTGFVQDIADDEVAVARVADAEAQAVIVCRAEFCLNVFQAVVSTVAAAEFEFDPSAGNVEFVVDDEDFFGFDFIKLRKGGNCLSGTVHERGRLEQPDIAVGQGSTGDFAEEFFFFFKSLPFPRQFVEEPKTRIVACLFVFFARVAQADNHFDCVHDIFRVSAECRLKASDGMVILLDFERVCGALLWGRSTAGGTLRCGRRRAAACRL

SEQ ID NO: 3654 - protein, 401 aa, Neisseria
MSNTIKMVVGLGNPGKEYEQTRHNAGFWFLDELAWKWKASFKEEKKFFGEVARAALPDGDVWLLKPATFMNRSGQAVAALAQFYKIKPEEILVVHDELDIPCGRIKFKLGGGNGGHNGLKDIQAKLGTADYYRLRLGIGHPGDRNLVVGYVLNKPSAEAPPANRRCRRQIPAGRTRHHFRQMGRGNALPAQQIIQCRLKPFQTAFSRFPYPNSHERTQAAYPNGIHPRHRRNPRFPAVRMQHRRSTVRRRSGTMARHTCRTRRQIPAPVQNLPNVAGRGGGMKLPRNRFSLLSALWFAGGIYSLLFKAADTAPPPFPHFDKAAHLALFFAQILFLAKAFKTGKLPIPYRSLIAFAFCFAVGSECAQAWFTATRTGSLGDVLADLTGAALALFAARSACRPD

SEQ ID NO: 3655 - protein, 401 aa, Neisseria
  VARIANT (1)...(401): Xaa = Any Amino Acid
MSNTIKMVVGLGNPGKEYEQTRHNAGFWFLDELAWKWKASFKEEKKFFGEVARAALPDGDVWLLKPATFMNRSGQAVAALAQFYKIKPEEILVVHDELDIPCGRIKFKLGGGNGGHNGLKDIQAKLGTADYYRLRLGIGHPGDRNLVVGYVLNKPSTEXPPTDXRCRRQIPASHTRHPCRQMGRSNPLPAQQMTRCRLKPFQTACSRFPYPNSHDRTQAAYPNRIHPRHRRNPRFPALRMQHRRCPLRRRNCRLARYAGRTRRKIPAPIQTMPDMAXRGTSMNLPRNRFILLSALWFAGSIYSLLFKAAETAPPPFPHFDKVAHLALFFAQIWLLTKAFRTDNRPIPYRSLMVFALCFALFSECAQAWFTATRTGSLGDVLADLTGAALALFTARAACRPD

SEQ ID NO: 3656 - protein, 398 aa, Neisseria
  VARIANT (1)...(398): Xaa = Any Amino Acid
MSNTIKMVVGLGNPGKEYEQTRHNAGFWFLDELAWKWKASFKEEKKFFGEVARATLPDGDVWLLKPTTFMNRSGQAVAALAQFYKIKPEEILVVHDELDIPCGRIKFKLGGGNGGHNGLKDIQAKLGTADYYRLRLGIGHPGDRNLVVGYVLNKPSTEXPPTDRCRRQIPASHTRHPCRQMRGNPLPAQQMTRCRLKPFQTACSRFPYPNSHDRTQAAYPNRIHPRHRRNPRFPAVRMQHRRRTIRRRSGTMARHTCRTRRQIPAPVQNLPNVAGRGGGMKLPRNRFSLLSALWFAGGIYSLLFKAADTAPPPFPHFDKAAHLALFFAQIWLLTKAFKTGKLPIPYRSLMVFALCFALFSECAQAFTATRTGSLGDVLADMAGTVLALFAARAADRPD

SEQ ID NO: 3657 - protein, 324 aa, Neisseria
MPSEKNIGFMAGSSRPLRVAFALLLVSCILFMTLNVKGDWDFVLHLRLTKLAALLMVAYAVGVSTQLFQTLTNNPILTPSILGFDSLYVFLQTLLVFTFGGVGYTSLPLTGKFGFELVVMMGGSLLLFYTLIRQGGRDLPHMILIGVIFGILFRSLSSLLSRMIDPEEFTAAQANMFAGFNTVRSELLGIGALVLLVSAAVVWHERYRSDVHLLGRDQAVNLGISYTRNTLWILLWIAALVATATAVVGPVSFFGLLAASLANHFSPSVRHSVRLPMTVCVGGILLVGGQTVFEHFLGMKAVLSVVVEFAGGLVFLYLVLKHKK

SEQ ID NO: 3658 - protein, 324 aa, Neisseria; identical to SEQ ID NO: 2507

SEQ ID NO: 3659 - protein, 324 aa, Neisseria
MPSEKNIGFMAGSSRPLWVAFALLLVSCILFMTLNVKGDWDFVLHLRLTKLAALLMVAYAVGVSTQLFQTLTNNPILTPSILGFDSLYVFLQTLLVFTFGGVGYASLPLTGKFGFELVVMMGGSLLLFYTLIKQGGRDLPRMILIGVIFGILFRSLSSLLSRMIDPEEFTAAQANMFAGFNTVHSELLGIGALILLVSAAVVWRERYRLDVHLLGRDQAINLGISYTRNTLWILLWIAALVATATAVVGPVSFFGLLAASLANHFSPSVKHSVRLPMTVCVGGILLVGGQTVFEHFLGMKAVLSVVVEFAGGLVFLYLVLRHKK

SEQ ID NO: 3660 - protein, 164 aa, Neisseria
MKKTLLAIVAVFALSACRQAEEAPPPLPRQISDRSVGHYCSMNLTEHNGPKAQIFLNGKPDQPVWFSTVKQMFGYTKLPEEPKGIRVIYVTDMGNVTDWTNPNADTEWIDAKKAFYVIDSGFIGGMGAEDALPFGNKEQAEKFAKDKGGKVVGFDDMPDAYIFK

SEQ ID NO: 3661 - protein, 164 aa, Neisseria; identical to SEQ ID NO: 1157

SEQ ID NO: 3662 - protein, 164 aa, Neisseria; identical to SEQ ID NO: 1157

SEQ ID NO: 3663 - protein, 415 aa, Neisseria
MQLTAVGLNHQTAPLSIREKLAFAAAALPEAVRNLARSNAATEAVILSTCNRTELYCVGDSEEIIRWLADYHSLPIEEIRPYLYTLDMQETVRHAFRVACGLDSMVLGEPQILGQIKDAVRAAQEQESMGAKLNALFQKTFSVAKEVRTDTAVGENSVSMASASVKLAEQIFPDIGDLNVLFIGAGEMIELVATYFAAKNPRLMTVANRTLARAQELCDKLGVNAEPCLLSDLPAILHDYDVVVSSTASQLPIVGKGMVERALKQRQSMPLFMLDLAVPRDIEAEVGDLNDAYLYTVDDMVNIVQSGKEARQKAAAAAETLVSEKVAEFVRQQQGRQSVPLIKALRDEGEKARKQVLENAMKQLAKGATAEEVLERLSVQLTNKLLHSPTQTLNKAGEEDKDLVHAVAQIYHLDK

SEQ ID NO: 3664 - protein, 415 aa, Neisseria; identical to SEQ ID NO: 1153

SEQ ID NO: 3665 - protein, 415 aa, Neisseria
MQLTAVGLNHQTAPLSIREKLAFAAACLPEAVRNLARSNAATEAVILSTCNRTELYCVGDSEEIIRWLADYHSLPIEEISPYLYTLGMQETVRHAFRVACGLDSMVLGEPQILGQIKDAVRVAQEQESMGKKLNALFQKTFSVAKEVRTDTAVGENSVSMASASVKLAEQIFPDIGDLNVLFIGAGEMIELVATYFAAKSPRLMTVANRTLARAQELCDKLGVNAEPCLLSDLPAILHEYDVVVSSTASQLPIVGKGMVERALKQRQSMPLFMLDLAVPRDIEAEVGDLNDAYLYTVDDMVNIVQSGKEARQKAAAAAETLVSEKVAEFVRQQQGRQSVPLIRALRDEGEKARKQVLENAMKQLAKGATAEEVLERLSIQLTNKLLHSPTQTLNKAGEEDKDLVHAVAQIYHLDK

SEQ ID NO: 3666 - protein, 119 aa, Neisseria
  VARIANT (1)...(119): Xaa = Any Amino Acid
MIRYLLIACGGISLLLGIIGIFLPLLPTTPFVLLSAACWAKASPRFHRWLHRHRYFGPMVHNWEQNGAVPRKAKIFAISMITASCLMIFWHFPQXWWVGAVSSVFCSLVTIRMWHRPES

SEQ ID NO: 3667 - protein, 119 aa, Neisseria; identical to SEQ ID NO: 1148

SEQ ID NO: 3668 - protein, 119 aa, Neisseria
MIRYLLIACGCISLLLGIIGIFLPLLPTTPFVLLSAACWAKASPRFHRWLHRHRYFGPMVHNWEQNGAVPRKAKIFAISMMTASCLIMFWQFPQRWWVGAVSSVFCSLVAIWMWRRPES

SEQ ID NO: 3669 - protein, 117 aa, Neisseria
MFATRKMKKMTMCTRRVRSWLAFSSGRIISIAAPVVPMIEASAVPTASRAVLSLGVPFKSPQTKMPPEMVYRASSSRMKGIYSSTSACATVWIPADAPKTKLNGMRKSNVQKAVILP

SEQ ID NO: 3670 - protein, 117 aa, Neisseria
MFATRKMKKMTMCTRRVRFWLAFSSGRIISIAAPVVPMIEASAVPTASRAVLSLGVPFKSPQTKMPPEMVYRASSSRMKGMYSSTSACATVWIPADAPKTKLNGMRKSNVQKAVILP

SEQ ID NO: 3671 - protein, 117 aa, Neisseria; identical to SEQ ID NO: 3670

SEQ ID NO: 3672 - protein, 210 aa, Neisseria
MSGLWKPEHPGFEILGSRYALQNLVRDVILITLTAVSMAITPKQVRAGNEFNFEPIAEVGKLFLGIFITIFPVLSILKAGEAGALGGVVSLVHDTAGHPINTMYFWMSGILSAFLDNAPTYLVFFNMAGGDAQALMTGPLFHSLLAVSMGSVFMGALTYIGNAPNFMVKAIAEQRGVPMPTFFRYMMWSVAFLTPVFIVHTLVFFVFKLL

SEQ ID NO: 3673 - protein, 210 aa, Neisseria
MSGLWKPEHPGFEILGSRYALQNLVRDVILIALTAVSMAITPKQVRAGNEFNFEPIAEVGKLFLGIFITIFPVLSILKAGEAGALGGVVSLVHDTAGHPINVMYFWMSGILSAFLDNAPTYLVFFNMAGGDAQALMTGTLFHSLLAVSMGSVFMGALTYIGNAPNFMVKAIAEQRGVPMPTFFGYMMWSVAFLTPVFIVHTLIFFVFKLL

SEQ ID NO: 3674 - protein, 210 aa, Neisseria
MSGLWKPEHPGFEILGSRYALQNLVRDVILIALTAVSMAITPKQVRAGNEFNFEPIAEVGKLFLGIFITIFPVLSILKAGEAGALGGVVSLVHDTAGHPINVMYFWMSGILSAFLDNAPTYLVFFNMAGGDAQALMTGSLFHSLLAVSMGSVFMGALTYIGNAPNFMVKAIAEQRGVPMPTFFGYMMWSVAFLTPVFIVHTLIFFVFKLL

SEQ ID NO: 3675 - protein, 119 aa, Neisseria
MCVPLKPAGCGPPNSCVSILAAFSDGTSAPAALHTWILRSVRRLNTNRPRLKSSAASLMMTVGSAASGLVSIALTKMANGSASTAGILLNGRVRSAVHKPDIRLRRTFSLLNFASASGT

SEQ ID NO: 3676 - protein, 120 aa, Neisseria
MCVPLKPAGCGPPNSCVSMLAAFSDGTSAPAALQTWILRSVKRLNTNRPRLKSSAASLIMTVGSAASGLVSIALTKMANGSASTAGILLNGRVRSAVHKPDWIRLRRTSSPLKFASASGA

SEQ ID NO: 3677 - protein, 120 aa, Neisseria
MCVPLKPAGCGPPNSCVSMLAAFSDGTSAPAALHTWILRSVKRLNTSKPRLKSSAASLITTTGSAASGLVSIALTKMANGSASTAGILLNGRVRSAVHKPDWIRLRRTSSPLKFANASGA

SEQ ID NO: 3678 - protein, 322 aa, Neisseria
  VARIANT (1)...(322): Xaa = Any Amino Acid
MTAKPFSLNLANLLLPAVLFAVSLSVGIADFRWSDVFSLSDSQQVMFISRLPRTFAIVLTGASIAVAGMIMQILMRNRFVEPSMAGAGQSAALGLLLMSLLLPAAPLPVKMSVAAVAALIGMLVFMLLIRRLPPTAQLMVPLVGXIFGGVVEAVATFVAYEFEMLQMLGVWQQGDFSSVLLGRYELLWITGGLAVFAYLIADRLTILGLGETVSVNLGLNRTAVLWSGLIIVALITSLVIVTVGNIPFIGLVVPNIVSRLMGDRLRQSLPAVALLGASLVLLCDIIGRMIVFPFEIPVSTVFGVLGTALFLWLLLRKPAYAV

SEQ ID NO: 3679 - protein, 322 aa, Neisseria; identical to SEQ ID NO: 2506

SEQ ID NO: 3680 - protein, 322 aa, Neisseria
MTAKPFSLNLTNLLLLAVLFAVSLSVGVADFRWSDVFSLSDSQQVMFISRLPRTFAIVLTGASMAVAGMIMQILMRNRFVEPSMAGAGQSAALGLLLMSLLLPAAPLPVKMSVAAVAALIGMLVFMMLIRRLPPTAQLMVPLVGIIFGGVVEAVATFIAYENEMLQMLGVWQQGDFSGVLLGRYELLWATGILALFAYLIADQLTILGLGETVSVNLGLNRTAILWSGLIIVALITSLVIVTVGNIPFIGLVVPNIISRLIGDRLRQSLPAVALLGASLVLLCDIIGRVIVFPFEIPVSTVFGVLGTALFLWLLLRKPAHAV

SEQ ID NO: 3681 - protein, 284 aa, Neisseria
MMILVWLALFPPMFYGMYNVGAQAFGALTPDLLQQSIAHDGNYALANALGINMSPEAGVLGKMLFGAIYFLPIYATVFIVGGFWEVLFASVRKHEINEGFFVTSILFALIVPPTLPLWQAALGISFGVVVAKEVFGGTGKNFMNPALAGRAFLFFAYPANLSGDAVWTAVDGYSGATALAQWAAHGADGLKNAVTGQTITWMDAFIGKLPGSIGEVSTLALLIGGAFIVFARIASWRIIAGVMIGMIAMSSLINFIGSDTKAMFAMHLVHGTWWKDDYHSLYIK

SEQ ID NO: 3682 - protein, 355 aa, Neisseria
MMILVWLALFPAMFYGMYNVGAQAFGALTPDLLQQNIANDWHYAFANALGINMSSEAGVSDKMLFGAIYFLPIYATVFVVGGFWEVLFATVRKHEINEGFFVTSILFALIVPPTLPLWQAALGISFGVVVAKEVFGGTGKNFMNPALAGRAFLFFAYPANLSGDAVWTAVDGYSGATALAQWAAHGADGLKNAVTGQTITWMDAFIGKLPGSIGEVSTLALLIGGAFIVFARIASWRIIAGVMIGMIAMSSLFNFIGSDTNAMFAMPWYWHLVVGGFAIGMLFMATDPVSASFTNVGKWWYGALIGVMCVLIRVVNPAYPEGMMLAILFANLFAPIFDYFVAQANIKRRKARSNG

SEQ ID NO: 3683 - protein, 355 aa, Neisseria
MMILVWLALFPAMFYGMYNVGAQAFGALTPDLLQQSIANDWHYALANALGINMSSEAGVLGKMLFGAIYFLPIYATVFIVGGFWEVLFATVRKHEINEGFFVTSILFALIVPPTLPLWQAALGISFGVVVAKEVFGGTGKNFMNPALAGRAFLFFAYPANLSGDAVWTAVDGYSGATALAQWAAHGADGLKNAITGQTITWMDAFIGKLPGSIGEVSTLALLIGGAFIVFARIASWRIIAGVMIGMIAMSSLFNFIGSDTNAMFAMPWYWHLVVGGFAIGMLFMATDPVSASFTNVGKWWYGALIGVMCVLIRVVNPAYPEGMMLAILFANLFAPIFDYFVAQANIKRRKARSNG

SEQ ID NO: 3684 - protein, 146 aa, Neisseria
MTRRRVGKQNRIAIHSAQYRKMVVFAVFQIHDDGDFQLRELFERQGIAFRLKTQIGHNAPHILKRRAHLFLTQFFQHFFFRQLLPVKIVQKRRHRSRPAGKIQILLYNIEIPPRFPTLQFDFSVNNRIIVKHRCSIQTIRQGSVPD

SEQ ID NO: 3685 - protein, 130 aa, Neisseria
MTQRRVGKQNRIAVYTAQYREMIILAVFQIHDDGDLQLCKLLERQGIAFRFKTQIRHNAPHILKRRGHLLLIQFFHVLFRQLLPVKIVQKRHHRSRPAGKIQILLYNIEIAPFFPTLHFDFSISNRIIVD

SEQ ID NO: 3686 - protein, 131 aa, Neisseria
MTQRRVGKQNRIAVYTAQYREMIILAVFQIHDDGDLQLCKLLERQGIAFRLKTQIRHDAPHILKRRAHLLLIQLFQHVLFRQLLPVKIVQKRRHRSRPAGKIQILLYNIEIAPFFPTLHFDFSISNRIIVD

SEQ ID NO: 3687 - protein, 331 aa, Neisseria
MIGGQFIVVGIVGKNALARFVDNIVVNIGIVDIVEHDALIAAADGDIVEHFEPFGKHQHIAHIVAHGNIAADFAVVGVHIVDGETQVAEAVVFIGVVRAGIGKNAVPPFGNVVADDLRAGRVPNGNAIAALIHAQGRIADDFILAHHRIGRTMKVYAERIIKNIVVFNQGARGGFFEINTGIHCWQAHTGTGNGQVAERYVRRVYGYGTPALVPFDGCGTVGRPFNRNRFVDIKFGLIYAGSQFDRIARPGAGKNFGKVVLRGNVDDGCRCRLKNAAGGKYQHGLQPYTERGCVHSVPLFRSVWPNKIKHHSNVPVFIAKPPETVRQAVWL

SEQ ID NO: 3688 - protein, 264 aa, Neisseria
MIGEKFIVVGIIGKYALACLVDNVVVNIGIVDIVEHNALIAAADGDIVEYFEPLGKHQHIAHIVAHGNIAADFAVVGVHIVDGETQIAEAVVFVGVVRAGIGKNAVPPFGNVVADDLRTGCVPNGNAVAALVHAQSRVADDFILAHHRIGRTMQIYADRIIQNIVVFNQGARGSFFEINTGIHCGQAHTGTGNGQVAERYVRRVYGYGTPAPVAFDGCGTVGRPFNRNRFVNVKFGFIYAGSQFERIARPGAGKCGIPISIIGS

SEQ ID NO: 3689 - protein, 265 aa, Neisseria
MIGGQFIVVGIVGKNALARFVDNVVVNIGIVDIVEHDALVAAADGDIVKHFEPLGKHQHIAHIVAHGNIAADFAVVGVHIVDGETQIAEAVVFIGVVRAGIGKNAVPPFGNIVADDLRAGRVPNGNAIAALVHAQSRVADDFILPHHRIGRTMQIDADRIIQNIIVFNQGARGSFFEINTGIHCGQAHTGTGNGQVAERYVRRVYGYGTPAPVSFDGCRTVGRPFNRNRFVDVKFGLIYAGSQFERIARPGAGKCGIPISIIDSW

SEQ ID NO: 3690 - protein, 343 aa, Neisseria
MSLPAMDAGIYLEKAAPRALVEHNNIFDNSFGVYLHGSADAMVRENKIVGDATLRVNERGNGVTVWNAPGAQVVGNDISKGRDGIFSNTSTHNTYKNNRFSDLRFAVHYMYTNDSEVSGNISVGNNMGYVLMFSERLKVFDNIAVGSRDGIMLNYVNYSDIHDNIINKAGKCVFAYNANYDKLSANHFENCQIGMHFTAAIEGTSLHDNSFINNGSQVKYVSTRFLDWSEGGHGNYWSDNSPFDLNGDGFGDSAYRPDGIIDQIIWRAPVSRLLMNSPAISIVKWAQAQFPAVLPGGVVDSKPLMKPYAPKIQTRYQAMKDELLKEAETRQSERGRAENGSLN

SEQ ID NO: 3691 - protein, 344 aa, Neisseria; identical to SEQ ID NO: 1155

SEQ ID NO: 3692 - protein, 344 aa, Neisseria
MSLPAMDAGIYLEETAPRALIEHNNILDNSVGVYLHGSADAMVRENKIVGDATLRVNERGNGVTVWNAPGAQVVGNDISKGRDGIFSNTSTHNTYKNNRFSDLRFAVHYMYTNDSEISGNISVGNNMGYVLMFSERLKVFDNIAVGSRDQGIMLNYVNYSDIHDNIINKAGKCVFAYNANYDKLSANHFENCQIGIHFTAAIEGTSLHDNSFINNESQVKYVSTRFLDWSEGGHGNYWSDNSAFDLNGDGFGDSAYRPNGIIDQIIWRAPVSRLLMNSPAISIVKWAQAQFPAVLPGGVVDSKPLMKPYAPKIQTRYQAMKDGLLKKVETRQLEWGRAENGSLN

SEQ ID NO: 3693 - protein, 396 aa, Neisseria
MIHIISILKSIGISGIAMSCFSIRRMSAFRARITAFFTAFVFLTAALPAYAERLPDFLAKIQPSEIFPGADRYGKPEGKPMVARVYKGDEQLGLVYITTDAVNTRGYSSKPIDTLMALANDGTIAGAKLVDHHEPIMLIGIPQSRVDKFIDKYIGLNFIKNPPTPSVAPGDIISGATVTLMVVNDSIQRSYKVIANQYRLGSDKALQTASASDVREAAPASETRPRRMANPDKQDILSWDELLKQKAVGHLHITLDQINKLFEKGGKAGVADHAEQGDPDDTFIDLYVALVSQPSIGKSLLGEDGWAHLQKRLKPGQQAVLVAGEGRYSWKGSGYVRGGIFDRIEMIQGENSFRFTDAQHERVVELSAADAPRFKEVSWFTIPEGVAFDGAEPWRL

SEQ ID NO: 3694 - protein, 143 aa, Neisseria
MIHIISILKSIGISGIVMSCFSIKRMSAFRARITAFFAAFVFLTAALPAYAERLPDFLAKIQPSEIFPGADRYGKPEGKPMVARVYKGDEQLGLVYITTDAVNTRGYSSKPIDTLMVLANDGTIAGAKLVDHHEPIMLIGIPH

SEQ ID NO: 3695 - protein, 143 aa, Neisseria
MIHIISILKSIGISGIVMSCFSIKRMSAFRARITAFFAAFVFLTAALPAYAERLPDFLAKIQPSEIVPGADRYSKPEGKPMVARVYKGDEQLGLVYITTDAVNTRGYSSKPIDTLMALAKDGTIAGAKLVDHHESIMLIGIPH

SEQ ID NO: 3696 - protein, 430 aa, Neisseria
MRYPPQSAVLQNAARCLLRRPKSACRRICPLSAISAVQYIFADVVQQEGCGVFVFLLYEDKKSGDDFADEDFLQGAGVGQGVFLQEAADVFGQSVVAGNGGKADIGLHGVEQGLVFVQLNACFFFFGGGADELVVNFGIKHIVRAFKNREGADIDGDIAGWVSAFKTLRAQEFLQHLRGGVSVFRGEGFDDVRLHQLMGDGRDGRNGMADVAVKDFGNLMAALDFAAFVIDESDIVADISVQVVKDVFHNAVRHADQLQAAADKDVLERAQTGSVAPGEFHHGGCRHFGIDAVDGVTDGAQAFGCEGFAADVCFGDEQQVDDFGEFAVFALFGGNEEEVALRIALPVFRGVDVNGLFVGIFVAGLHFACNRRAGGFGFGNAQTAAFAFENHVQTLCDLRFAAELLQRLQHQRAFDAGTQRNGHAVMPRNP

SEQ ID NO: 3697 - protein, 407 aa, Neisseria
ACRRICPLPAISAVQYIFADVVQQEGCGVFVFRLYEDKESGDDFADKDFLQGAGIGQGVFLQEAADVFRQSVVAGDGGKAGIGLQAVEQGLVFVQLHACFFFFGGGADKLVVNFGIKHIVRAFKNREGADVDSDIAGGVSAFKTLRTQEFLQHLRGGVSVFRGEGFDDVRLHQLMGDGGNRRNGMADVAVKNLGNLMAAPDFAAFVIDEFDVVADVSFQIFKDVFHNAVRHADQLQAAADKDVLERAQTGSVALGEFHHGGCRHFGIDAVDGVTDGAQAFGCEGFAADVCFGDEQQVDDFGEFAVFALFGGNEEEVALRVALPVFRGVDVNGLSVDIFVVGLHFACNRRAGGFGFGNTQTAALAFENHLQTLRDLRFIAELLQWLQHQRAFDAGTQRNGHAVMPRNP

SEQ ID NO: 3698 - protein, 406 aa, Neisseria
ACRRICPLSAISAVQYVFADVVQQEGCGVFVFRLYEDKESGDDFADKDFLQGAGIGQGVFLQEAADVFGQSVVAGDGGKAGIGLQAVEQGLVFVQLHACFFFFGGGADKLVVNFGIKHIVRAFKNREGADVDSDIAGGVSAFKTLRAQEFLQHLRGGVSVFRGEGFDDVRLHQLMGDGCNGRNGMADVAVKNLGNLMAAPDFAAFVIDESDVVADVSFQVFKGVFHNAVRHADQLQAAADKDVLERAQTGSVALGEFHHGGCRHFGIDAVDGVTDGAQAFGCEGFAADVCFGDEQQVDDFGEFAVFALFGGNEEEVALRVALPVFRGVDVNGLSVGIFVVRLHFSGNRRAGGFGFGNATAALAFENHVQTLCDLRFIAELLQWLQHQRAFDAGTQRNGHAVMPRNP

SEQ ID NO: 3699 - protein, 136 aa, Neisseria
  VARIANT (1)...(136): Xaa = Any Amino Acid
MVLPLMLLATIRSATLTLXRLAMLNRVSPSTTRWMLAWSGEVSASPSAALATRVSKRARRLPSAATVCCGDEEMLCSATVSGVPMTAEMVSSACRRRLFRATSCMSSSAACMSFGGMTCASVAVWVSDGMAVCFSV

SEQ ID NO: 3700 - protein, 135 aa, Neisseria
MVLPLMLLATIRSATLTLRLAMLNRVSPSTTRWMLAWSGEISASPSAALATRVSKRTRRLPSAAAVCCGDAEILCSATVSGVPMTAEMVSSACRRRLFRATSCMSSSAACMSFWGMICASVAVWVSDGMAVCFSV

SEQ ID NO: 3701 - protein, 135 aa, Neisseria
MVLPLMLLATIRSATLTLRLAMLNRVSPSTTRWMLAWSGEISASPSAALATRVSKRTRRLPSAATVCCGDEEMLCSATVSGVPMTAEMVSSACRRRLFRATSCMSSSAACMSFWGTICASVAVWVSDGMAVCFSV

SEQ ID NO: 3702 - protein, 517 aa, Neisseria
MPSERPADCCPVHFVVKFRKLTLNCGRRFDRPPINGNRQRKPMIHTEPSAQPSTMDTAAFLKHIESAFPRIFSDGIDLMRYLPEDKWLALKQAGLLLPFLDKKHGGRKGSQFEIQEVLRIAGHYGVPVTLRTGIEGALVLQPLQEFGGEAQVAQGLDMIFKGESRRLGVTEPETSGAAIAREMQSCYEYTDEQTIYVNAAKYWQGNSQSDFLLVAAKERKNGKLAKVIDLLLVPKTYIRCETLASEGLRAVRYAVNRIDAEMPATAVMKLSRGDAAGLRAFQNIFIRSRLQLIGMTHGIMEYILDNLNRYVRNDIRFVDYERREIQRRHQVSEILYRYVCHSVSPVAPVAHQLMEANIVKTLATEYTYAAAQMLQKLLGAKGFERGHPAGNIAIDIRPFTIFEGPNDMLYAEIYDQFVRATAEEKEAGIKLDKNQTLLDAVQTDVRFAAVARDYALPEDIRSFLQEHTLTDACALQKVFIGKIIARLFVFVQEEHEDTTAFLLNDIRKDILDCRYCG

SEQ ID NO: 3703 - protein, 517 aa, Neisseria
MPSERSADCCPAHFVVKFRKSTLNCGRRFDRPPINGNRQRKPMIHTEPSAQPSTMDTAAFLKHIESAFRRIFSDGIDLMRYLPEDKWLALKQAGLLLPFLDKKYGGRKGSQFEIQEVLRIAGHYGVPVTLRTGIEGALVLQPLQEFGDEAQVAQGLEMIFKGEGGGLGVTEPETSGAAIAREMQSYYEYIDGQTIYVNAAKYWQGNSQSDFLLVAAKERKNGKLAKVIDLLLVPKTYIRCETLASEGLRAVRYAVNRIDAEMPATAVMKLSQSDAAGLRAFQNIFIRSRLQLIGMTHGIMEYILENLERYVRNDIKFVDYERREIRRRHQVSEILYRYVCHSVSPVAPVAHQLMEANIVKTLATEYTYAAAQMLQKLLGAKGFERGHTAGNIAIDIRPFTIFEGPNDMLYAEIYDQFVRATAEEKEAGMKLDKNQTLLDRLQTDARFAAVARDYTLPEDIRSFLQEHTLTDACALQKVFIGKIIARLFVFVQAKHEDTAAFLLNDIRKDILDCRYCG

SEQ ID NO: 3704 - protein, 517 aa, Neisseria
  VARIANT (1)...(517): Xaa = Any Amino Acid
MPSERSADCCPAHFVVKFRKSTLNCGRRFDRPPINGNRQRKPMIHTEPSAQPSTMDTAAFLKHIESAFRRIFADGIDLMRYLPEDKWLALKQAGLLLPFLDKKYGGRKGSQFEIQEVLRIAGHYGVPVXXXXXXEGALVLQPLQEFGDEAQIAQGLDMVFKGEGGGLGVTEPETSGAAIAREMQSYYEYTDGQTIYVNAAKYWQGNSQSDFLLVAAKERKNGKLAKVIDLLLVPKTYIRCETLASEGLRAVRYAVNRIDAEMPATAVMKLSQSDAAGLRAFQNIFIRSRLQLIGMTHGIMEYTLENLERYVRNDIRFVDYERREIRRRHQVSEILYRYVCHSVSPVAPVAHQLMEANIVKTLATEYTYAAAQMLQKLLGAKGFERGHTAGNIAIDIRPFTIFEGPNDMLYAEIYDQFVRATAEEKEAGMKLDKNQTLLDRLQTDARFAAVARDYTLPEDIRSFLQEHTLTDACALQKVFIGKIIARLFVFVQAEHEDTAAFLLNDIRKDILDCRYCG

SEQ ID NO: 3705 - protein, 286 aa, Neisseria
MMMVLALGMSMPVSMMVEQSNTLNLCCKKSRMTCSSSRSRSCPCATPIRASGSRVSSRSRIFSIVSTSLCRKNTCPPRLSSRNTASRTLPSLNGLTKVFTARRRLGAVVISEKSRRPSSAMLRVRGIGVAVMVRMSTLARRRLSCSFCRTPKRCSSSIINKPKFLNFMSSCTNLCVPITISTVPSAMPSSVALVALLLLKRERLATFTGKSAKRSAKFCACCSTRSVVGASTATCLPPITATNAARRATSVLPKPTSPHTSRSIGFACVKSLITAAMAAAWSSVSS

SEQ ID NO: 3706 - protein, 285 aa, Neisseria
MMMVLALGISIPVSMMVEQSNTLNRCCKKSRMTCSSSRSRSCPCATPMRASGSRVSSRSRIFSIVSTSLCRKNTCPPRLSSRNTASRTLPSLKGLTKVLTARRRLGAVVISEKSRSPSNAILKVRGIGVAVMVRISTLARRRLSCSFRTPKRCSSSIITKPKFLNLMSSCTSLCVPITISTVPSAMPSSAALVALLLLKRERLATFTGKSAKRSAKFCACCSTKSVVGASTATCLPPITATNAARRATSVLPKPTSPHTRRSIGFACVKSLITAAMAAAWSSVSS

SEQ ID NO: 3707 - protein, 285 aa, Neisseria
MMMVLALGMSIPVSMMVEQSNTLNRCCKKSRMTCSSSRSRSCPCATPMRASGSRVSSRSRMFSMVSTSLCRKNTCPPRLSSRNTASRTLPSLNGLTKVLTARRRLGAVVISEKSRSPSSAILKVRGIGVAVMVRMSTLARRRLSCSFRTPKRCSSSIITKPTFLNFMSSCTSLCVPITISTVPSAMPSSAALVALLLLKRERLATFTGKSAKRSAKFCACCSTRSVVGASTATCLPPITATNAARRATSVLPKPTSPHTRRSIGFACVKSLITAAMAAAWSSVSS

SEQ ID NO: 3708 - protein, 103 aa, Neisseria
MQRLAADGIQIFFVGVDGQFALRINGLVKERARSVFFGKVCRCFEQVILYGFKGTVGQTERGTVAVADTVFRQIVGVVDDTDAERTAVHSRGTRGFYRISLII

SEQ ID NO: 3709 - protein, 103 aa, Neisseria
MQRLAADGIQIFFVSVDGQFALRINGLVKERARTVFFGKVCRCFEQVILYGFKGTVGQTERGTVAVADTVFRQIISIVNHADAERTAAHSRGTRGFYRISLII

SEQ ID NO: 3710 - protein, 103 aa, Neisseria
VQRLVTHSVQVFFVGVDGQFALRINGLVKERARTVFFGKVCRCFEQVILYGFKGTVGQTERGAVAVADTVFRQIIRIVDHADTERTAAHSGGTRGFYRISLII

SEQ ID NO: 3711 - protein, 211 aa, Neisseria
MNRRNARIERAVRIAVIDVLNVDAPGPGTLLHQRGKQVGSRNDTLAYVRVLLVFRIEPLKFVLVGKKRFVQPRNLVGRKQRNVAALNQAGVQQAVDLHAIIKLADTVVFHAPVVFQHQQAFGFNMPQGVEQGCRAAAHATLRTRFDRRLKHLKEGNAAGMPGFTAPDFAVQPADTSGIDADARALGNVFHNRAGSGIDGIQTIVAFNQHTA

SEQ ID NO: 3712 - protein, 211 aa, Neisseria
MNRRDARIERAVRIAVIDVLNVDAPGSGTLLHQRGKQVGSRNDALADIRVLLVFRIEPLKFVLVGKKRFVQSRNLVGRKQRNVAALNQAGVQQAVDLHAVIKLTDTVVFHTAVVFQHQQAFGFDMPQGVEQGCRAAAHAALRTGFDRRLKHFKEGNAAGMPRFAAPDFAVQTADTSGIDADARTLGNVFHNRAGSGIDGIQTIVAFNQHTA

SEQ ID NO: 3713 - protein, 211 aa, Neisseria
MNRRNARIERAVRIAVIDVLNVDAPGSGTLLHQRGKQVGSRNDALADIRVLLVFRIEPLKFVLVGKKRFVQSRNLVGRKQRNVAALNQAGVQQAVDLHAVIKLTDTVVFHAPVVFQHQQAFGFDMPQGVEQGCRAAAHATLRTGFDCRLKHFKEGNAAGMPCFAAPDFAVQSADTSGIDADARTLGNVFHNRAGSGVDGIQAVVAFDQYAA

SEQ ID NO: 3714 - protein, 103 aa, Neisseria
MLAILLSAILGLVSTTAAAGTSEPAHRHTKHISKANKQMLHPECRKYLERRAAWYRSQGNVQELRENKKARKAFRTLPYAEQKIQCRAAYEAFDDFDGGRFRR

SEQ ID NO: 3715 - protein, 103 aa, Neisseria
MLAILLSAILGLVSTTAAAGTSEPAHRDTKHIRKANKQMLHPECRKYLERRAAWYRSQGNVQELRENKKARKAFRSLPYAEQKIQCRAAYEAFDDFDGGSFRR

SEQ ID NO: 3716 - protein, 103 aa, Neisseria
MLAILLSAILGLVSTTAAAGTSEPAHRDTKHIRKANKQMLHPECRKYLERRAAWYRSQGNVQELRENKKARKAFRSLPYKEQKTQCRAAYEAFDDFDGSRFRR

SEQ ID NO: 3717 - protein, 465 aa, Neisseria
MSKLKTIALTASGLSVCPGFLYAQNTSSHQVGLAIMRLNSSILDLPPTKQYFQSGSLWDELRQGFRMGEVNPELVRRHESKFIASRSYFDRVVNRSRPYMYHIANEVKKRNMPAEAALLPFIESAFVTKAKSHVGASGLWQFMPATGRHYGLEKTPVYDGRHDVYAATDAALNYLQYLYGLFGDWPLAFAAYNWGEGNVGRAVNRARDQGLEPTYENLRMPNETRNYVPKLLAVRNIIATPQSFGMNISDIDNKPYFQAVEPGRPLDNEAIARLAGITQSELLALNPAFNVPAFIPKNKRKLLLPVASVQTFQSNYLNAAPDSLFSWEVYTPAAKTSLSDISTATGMSIADIKRLNNLNGNLVNAGRSILVAKNGKTLHTASESVVSIDIDNTPDTYRSNMPAGTVNVSIARIQPAAAQTADITVAPLPQETVRTGTRSPCPHYRTRPCDSRSATSNRKTDCHAV

SEQ ID NO: 3718 - protein, 465 aa, Neisseria
  VARIANT (1)...(465): Xaa = Any Amino Acid
MSKLKTIALTASGLSVCPGFLYAQNTSSHQIGLAIMRLNSSILDLPPTKQYFQSGSLWGELRQGFRMGEVNPELVRRHESKFIASHSYFNRVINRSRPYMYHIANEVKKRNMPAEAALLPFIESAFVTKAKSHVGASGLWQFMPATGRHYGLEKTPVYDGRHDVYAATDAALNYLQYLYGLFGDWPLAFAAYNWGEGNVGRAINRARAQGLEPTYENLRMPNETRNYVPKLLAVRNIIATPQSFGMNISDIDNKPYFQAVEPDRPLDNEAIARLAGITQSELLALNPAFNVPAFIPKSKRKLLLPVASVQTFQSNYLNAAPDSLFSWEVYTPAAKTSLSDISTATGMSIADIKRLNNLNGNLVNAGRSILVAKNGKTLQTASESVVSIDIDNTPDTYRSNMPAGTVNVGIARIRPAAAQTADITVAPLPQKTVRTXTRSPCPYCRTCPCDSRSATSNRKTDRHAV

SEQ ID NO: 3719 - protein, 465 aa, Neisseria
  VARIANT (1)...(465): Xaa = Any Amino Acid
MSKLKTIALTASGLSVCPGFLYAQNTSSHQIGLAIMRLNSSILDLPPTKQYFQSGSLWSELRQGFRMGEVNPELVRRHESKFIASHSYFNRVINRSRPYMYHIANEVKKRNMPAEAALLPFIESAFVTKAKSHVGASGLWQFMPATGRHYGLEKTPVYDGRHDIYAATDAALNYLQYLYGLFGDWPLAFAAYNWGEGNVGRAINRARAQGLEPTYENLRMPNETRNYVPKLLAVRNIIAAPQSFGMNISDIDNKPYFQAVEPDRPLDNEAIARLAGITQSELLALNPAFNVPAFIPKSKRKLLLPVASVQTFQSNYLNAAPDSLFSWEVYTPAAKTSLSDISTATGMSIADIKRLNNLNGNLVNAGRSILVAKNGKTLQTASESVVSIDIDNTPNTYRSNMPAGTVNVGIARIRPAAAQTADITVAPLPQKTVRTXTRSPCPYCRTCPCDSRSATSNRKTDRHAV

SEQ ID NO: 3720 - protein, 335 aa, Neisseria
MIELDGTENKGNLGANATLAVSMAVARAAAEDSGLPLYRYLGGAGPMSLPVPMMNVINGGEHANNSLNIQEFMIMPVGAKSFREALRCGAEIFHALKKLCDSKGFPTTVGDEGGFAPNLNSHKEALQLMVEAAEAAGYKAGEDVLFALDCASSEFYKDGKYHLEAEGRSYTNAEFAEYLEGLVNEFPIISIEDGMDENDWEGWKLLTEKLGKKVQLVGDDLFVTNPKILAEGIEKGVANALLVKVNQIGTLSETLKAVDLAKCNRYASVMSHRSGETEDSTIADLAVATNCMQIKTGSLSRSDRMAKYNQLLRIEEELAEAAYYPGKAAFYQLGK

SEQ ID NO: 3721 - protein, 335 aa, Neisseria
MIELDGTENKGNLGANATLAVSMAVARAAAEDSGLPLYRYLGGAGPMSLPVPMMNVINGGEHANNSLNIQEFMIMPVGAKSFREALRCGAEIFHALKKLCDSKGFPTTVGDEGGFAPNLNSHKEALQLMVEATEAAGYKAGEDVLFALDCASSEFYKDGKYHLEAEGRSYTNAEFAEYLEGLVNEFPIISIEDGMDENDWEGWKLLTEKLGGRVQLVGDDLFVTNPKILAEGIEKGVANALLVKVNQIGTLSETLKAVDLAKRNRYASVMSHRSGETEDSTIADLAVATNCMQIKTGSLSRSDRMAKYNQLLRIEEELAEAADYPSKAAFYQLGK

SEQ ID NO: 3722 - protein, 335 aa, Neisseria
MIELDGTENKGNLGANATLAVSMAVARAAAEDSGLPLYRYLGGAGPMSLPVPMMNVINGGEHANNSLNIQEFMIMPVGAKSFREALRCGAEIFHALKKLCDSKGFPTTVGDEGGFAPNLNSHKEALQLMVEATEAAGYKAGEDVLFALDCASSEFYKDGKYHLEAEGRSYTNAEFAEYLEGLVNEFPIISIEDGMDENDWEGWKLLTEKLGGKVQLVGDDLFVTNPKILAEGIEKGVANALLVKVNQIGTLSETLKAVDLAKRNRYASVMSHRSGETEDSTIADLAVATNCMQIKTGSLSRSDRMAKYNQLLRIEEELAEAADYPSKAAFYQLGK

SEQ ID NO: 3723 - protein, 428 aa, Neisseria
MSAIVDIFAREILDSRGNPTVECDVLLESGVMGRAAVPSGASTGQKEALELRDGDKSRYSGKGVLKAVEHVNNQIAQALIGIDANEQSYIDQIMIELDGTENKGNLGANATLAVSMAVARAAAEDSGLPLYRYLGGAGPMSLPVPMMNVINGGEHANNSLNIQEFMIMPVGAKSFREALRCGAEIFHALKKLCDSKGFPTTVGDEGGFAPNLNSHKEALQLMVEAAEAAGYKAGEDVLFALDCASSEFYKDGKYHLEAEGRSYTNAEFAEYLEGLVNEFPIISIEDGMDENDWEGWKLLTEKLGKKVQLVGDDLFVTNPKILAEGIEKGVANALLVKVNQIGTLSETLKAVDLAKCNRYASVMSHRSGETEDSTIADLAVATNCMQIKTGSLSRSDRMAKYNQLLRIEEELAEAAYYPGKAAFYQLGK

SEQ ID NO: 3724 - protein, 428 aa, Neisseria; identical to SEQ ID NO: 1834

SEQ ID NO: 3725 - protein, 428 aa, Neisseria [sequence omitted]

SEQ ID NO: 3726 - protein, 163 aa, Neisseria
MAAEPMRMPEVTYGFSGSFGMAFLLTVMCALPKAASAALPVIFIGCRSTRKTWLSVRPETMRKPRLTNSSAMTAALIFTCFAYCLNSGCNASLNATALAAITCINGPPCRLGKMEEFSAFSWVLSRHKITPPRGPRRVLWVVVVTKSQNGTGLGYSPPATSPA

SEQ ID NO: 3727 - protein, 163 aa, Neisseria
MAAEPMRMPEVTKGFSGSFGMAFLLTVMCALPKAASAALPVIFIGCRSTRKTWLSVRPETMRKPRLTNSSAMAAALIFTCFAYCLNSGCNASLNATALAAITCISGPPCRLGKMEEFNAFSWVLSRHKITPPRGPRRVLWVVVVTKSQNGTGLGYSPPATRPA

SEQ ID NO: 3728 - protein, 163 aa, Neisseria; identical to SEQ ID NO: 3727

SEQ ID NO: 3729 - protein, 144 aa, Neisseria
MPRFSGSISSMISIARTFGAPESVPAGKVAARMSILVTPSFKQPSTLETMCITWEYFSITILSVTLTSPVLLMRPTSLRPKSISITCSAISLASLNKSCSLARSSAGVLPRRRVPAMGRTMTSSRSRRTRISGEEPTMWKSPKS

SEQ ID NO: 3730 - protein, 144 aa, Neisseria
MPRLLGSTSSMISMARTLGAPESVPAGKVAARMSMLVMPSFRRPSTLETMCITWEYFSITILSVTLTSPVLLMRPTSLRPKSINMTCSAISLASLNKSCSLARSSAGVLPRRRVPAMGRTITSLRSRRTRISGEEPTMWKSPKS

SEQ ID NO: 3731 - protein, 144 aa, Neisseria
MPRLLGSTSSMISMARTLGAPESVPAGKVAARMSMLVMPSFRRPSTLETMCITWEYFSITILSVTLTSPVLLMRPTSLRPKSINMTCSAISLASLNKSCSLARSSAGVLPRRRVPAMGRTMTSSRSRRTRISGEEPTMWKSPKS

SEQ ID NO: 3732 - protein, 378 aa, Neisseria
MNTPPILPPAMLGILGGGQLGRMFAVAAKTMGYKVTVLDPDPNAPAAEFADRHLCAPFDDRAALDELAKCAAVTTEFENVNADAMRSLAKHTNVSPSGDCVSIAQNRIQEKAWIRKAGLQTAPYQAVCKAEDITEASAQFLPGILKTATLGYDGKGQIRVKTLDELKAAFAEHGGVDCVLEKMVDLRGEISVIVCRLNDENVQTFDPAENIHENGILAYSIVPARLSADVQQQARQTAQRLADELDYVGVLAVEMFVVGDTHELLVNETAPRTHNSGHHTIDACAADQFQQQVRIMCNLPPADTKLLSPCCMANILGDVWQEDGGEPDWLPLQSRPNAHLHLYGKKTAQKGRKMGHFTVLTTDSDTAFQEAKKLHQSL

SEQ ID NO: 3733 - protein, 378 aa, Neisseria; identical to SEQ ID NO: 1585

SEQ ID NO: 3734 - protein, 378 aa, Neisseria
MKNISLSPPAMLGILGGGQLGRMFTVAAKTMGYKVTVLDPNPNAPAAEFADRHLCAPFDNQTALEELAKCAAVTTEFENVNADAMRFLAKHTNVSPSGDCVAIAQNRIQEKAWIRKAGLQTAPYQAICKAEDITEESIQFLPGILKTATLGYDGKGQIRVKTVDELKAAFAEHRGVDCVLEKMVDLRGEISVIVCRLNNDNVQTFDPAENIHENGILAYSIVPARLSADIQQQARQMAQRLADELNYVGVLAVEMFVVGDTHELVVNEIAPRPHNSGHHTVDACAADQFQQQVRLMCNLPPADTKLLSSCCMANILGDVWQEDGGEPDWFPLQSRPDAHLHLYGKKTAHKGRKMGHFTILSTDSDTAFQEAKKLHQSL

SEQ ID NO: 3735 - protein, 259 aa, Neisseria
MVAGIVRARGGFIDEQFMCVADNKHFYRQYADIIQFVRQALRRLPRLLLHVGTQPRGDDGISQDAVFVDVFGGVEGLHVFIVQTAYDHGNLAAQVHHFFQNAIHAAVFGKRGFEFVQRFDADLTFAVVAQRSRFQDAGQKLRACFSNVFGLANRLIRRGLQACFAYPRFFLNAVLCNGHAVAAGGNVGMLCQRAHRVGIDVFKFGRNRRAFCQFVQRGPVVKRRAQMAVGKFRRRRIRVGIENGYFVAHGFSGNGKHSA

SEQ ID NO: 3736 - protein, 259 aa, Neisseria
MVSGIVRARGDFVDDQFMRVTDNKHFYRQYADIIQFVRQALRHLPRLLLHVGTQSRGDDGISQDAVFVDVFGRVESLHVVIVQTAYDYGNFTAQIHHFFQNAIHAAVFGKRGFEFIQCFYADLTFAVVAQRSRFQDAGQKLRACFSDVFSLTNHLIRRGLQSRFAYPCLFLNAVLCNRHTIAARGNIGMFCQKAHRIGIDVFKFSGHRRAFCQFVQSSLVVKRRAQMAVGKFCCRRVRIGVENGYFVAHGFGGNGKHSA

SEQ ID NO: 3737 - protein, 259 aa, Neisseria
MVAGIVRTRRDFVDDQFMRVADNKHFYRQYADVVQFIGQTLRHLSRLLLNVGTQSGWDDGVGEDTVFVNVFGRIESLHVVIVQTAYDNGNFAAQVHHFFQNAIHAAVFGKRGFEFIHRFDADLAFAVIAQCSGFQDAGQKLYAFFSDVFGFANCLIRRGLQACFAYPCLFLNAVLRDGNAVAAGGNIGMFGEKTHRIGIDVFELGRNSRTFCQFFQSGLVVKRRTQMAVGKFRCRRIRVGIEYGYFVAHGFGSNSKHSA

SEQ ID NO: 3738 - protein, 298 aa, Neisseria
  VARIANT (1)...(298): Xaa = Any Amino Acid
MHIGGYFIDNPIALAPMAGIADKPFRRLCRAFGAGWAVCEMLASDPTLRNTGKTLHRSDFADEGGIVAVQIAGSDPEQMADAARYNVGLGAQVIDINMGCPAKKVCNVQAGSALMQDEPLVAAILEAVVKAAGVPVTLKTRLGWHDDDQNLPAVAKIAEDCGIAALAVPRARAHANVQRRGALRTHRRDQKPSEHPGLGQRRHHFAAKSRRRPQTNRRRRHHDRARRARQAVVFPRFEALCRTRRFTACLEFGRMQSRHFEPHPRHARVLWXDRRCAHRTQTHRLVHRRNARRRTGAA

SEQ ID NO: 3739 - protein, 298 aa, Neisseria
  VARIANT (1)...(298): Xaa = Any Amino Acid
MHIGGYFIDNPIALAPMAGITDKPFRRLCRDFGAGWAVCEMLTSDPTLRNTRKTLHRSDFADEGGIVAVQIAGSDPQQMADAARYNVSLGAQLIDINMGCPAKKVCNVQAGSALMQNEPLVAAILEAVVRAAGVPVTLKTRLGWHDDHQNLPVIAKIAEDCGIAALAVXRTHAYANVQRRSALRTHRRNQMPSEHPGLGQRRHYFAAKSPSRPQTNRRRRHYDRARRARQAVVLPRFETLCRTRCFAACLEFGRMRRRYFEPHPRHTRVLRRHRRCAHRTQTHRLVHRRNARRRTDTS

SEQ ID NO: 3740 - protein, 298 aa, Neisseria
  VARIANT (1)...(298): Xaa = Any Amino Acid
MHIGGYFIDNPIALAPMAGITDKPFRRLCRDFGAGWAVCEMLTSDPTLRNTRKTLHRSDFADEGGIVAVQIAGSDPQQMADAARYNVSLGAQLIDINMGCPAKKVCNVQAGSALMQNEPLVAAILEAVVKAAGVPVTLKTRLGWHDDHQNLPVIAKIAEDCGIAALAXPRTHAHANVQRRSGLRPDCRNQMPSEHPGLGQRRHYLAAKSPSRPQTNRRRRHYDRARRARQTVVLPRFETLRRTRCFTACLEFGRMYRHYFEPHPSHARVLRRHRRCAHRTQTHRLVHRRNARRRTDTS

SEQ ID NO: 3741 - protein, 293 aa, Neisseria
MCTEMKFIFFVLYVLQFLPFALLHKIAGLIGSLAYLLVKPRRRIGEINLAKCFPEWDEEKRKTVLKQHFKHMAKLMLEYGLYWYASAKCLKSLVRYRNKHYLDDALAAGEKVIILYPHFTAFEMAVYALNQDVPLISMYSHQKNKILDEQILKGRNRYHNVFLIGRTEGLRALVKQFRKSSAPFLYLPDQDFGRNNSVFVDFFGIQTATITGLSRIAALANAKVIPAIPVREADNTVTLQFYPAWKSFPSEDAQADAQRMNRFIEERVREHPEQYFWLHKRFKTRPEGSPDFY

SEQ ID NO: 3742 - protein, 293 aa, Neisseria
MCIEMKFIFFVLYVLQFLPFALLHKIADLTGLLAYLLVKPRRRIGEINLAKCFSEWSEEKRKTVLKQHFKHMAKLMLEYGLYWYAPAGRLKSLVRYRNKHYLDDALAAGEKVIILYPHFTAFEMAVYALNQDIPLISMYSHQKNKILDEQILKGRNRYHNVFLIGRTEGLRALVKQFRKSSAPFLYLPDQDFGRNDSVFVDFFGIQTATITGLSRIAALANAKVIPAIPVREADNTVTLHFYPAWKSFPGEDAKADAQRMNRFIEDRVREHPEQYFWLHKRFKTRPEGSPDFY

SEQ ID NO: 3743 - protein, 293 aa, Neisseria
MCIEMKFIFFVLYVLQFLPFALLHKLADLTGLLAYLLVKPRRRIGEINLAKCFPEWDGKKRKTVLKQHFKHMAKLMLEYGLYWYAPAGRLKSLVRYRNKHYLDDALAAGEKVIILYPHFTAFEMAVYALNQDVPLISMYSHQKNKILDEQILKGRNRYHNVFLIGRTEGLRALVKQFRKSSAPFLYLPDQDFGRNDSVFVDFFGIRTATITGLSRIAALANAKVIPAIPVREADNTVTLHFYPAWESFPSEDAQADAQRMNRFIEERVREHPEQYFWLHKRFKTRPEGSPDFY

SEQ ID NO: 3744 - protein, 183 aa, Neisseria
MIHPHHFRAFFINGHGVEIVHLLIADGAHRMGGRACVFGELVLAQQADVLDAAHGAAGAVAGKLLVAEHGQPFLQRKLEPVAAGYAVARPVVEIFVSDHGFNAFEIGIGGGAAVGEDELGVKNVQTLVFHRAHIEIAYGDDHENIQVIFQPEARFVPLHRVFSTIPRQSRPWVCPLRWCKTRF

SEQ ID NO: 3745 - protein, 183 aa, Neisseria
  VARIANT (1)...(183): Xaa = Any Amino Acid
VIHPHYFRAFFINGHGVEIVHLLIAGGAHRMGGRACVFGELVLAQQADVFDAAHGAAGAVAGKFLVAEHGQPFLQRKLEPVAAGYAVARPVVEILVSDHGFDAFEIGIGGGAAVGKDELGVKDVQTLVFHRAHIEIAHGDDHENIQVVFQTEARFVPFHRVFXTIPRQSRPWACPLRWCKTRF

SEQ ID NO: 3746 - protein, 183 aa, Neisseria
  VARIANT (1)...(183): Xaa = Any Amino Acid
VIHPHHFRAFFINGHGVEIVHLLISGGAHRMCGRTCVFGELVLAQQADVFDTAHGAAGAVAGKFLVAEHGQPFLQRKLEPVAAGHAVARPVVEIFVSDHGFDAFKIGIGGGTAVGKDELGVKDVQTLVFHRTHIEIAHGDDHENIQVVFQTEARFVPLHCVFXAIPRQSRPWACPLRWCKTRF

SEQ ID NO: 3747 - protein, 638 aa, Neisseria
MKWDETRFGLEYDLDIFMVVAVGDFNMGAMENKGLNIFNTKFVLADSRTATDTDFEGIESVVGHEYFHNWTGNRVTCRDWFQLSLKEGLTVFRDQEFSGDRAGRAVRRIENIRLLRQNQFPEDAGPTAHPVRPVSYEEMNNFYTMTVYEKGAEVVRMYHTLLGEEGFQKGMKLYFQRHDGQAVTCDDFRAAMADANGINLDQFALWYSQAGTPVLEAEGRLKNNVFELTIKQTVPPTPDMADKQPMMIPVKVGLLNRNGEAVAFDYQGKRATEAVLLMTEAEQAFPLEGVTEAVVPSLLRGFSAPVYLNYPYSDDDLLLLLAHDSDAFTCWEAAQTLYRRAVAANLAALSDGIGLPKHEKLLAAVEKVISDDLLDNAFKALLLGVPSEAELWDGTENIDPLRYHQAREALLDTLAVRFLPKWHELDRQAAKQENQSYEYSPETADWRTLRNVCRAFVLRADPAHIETVAEKYGEMAQNMTHEWGILSAVNGNESDTRNCLLAQFADKFSDDALVMDKYFALIGSSRRSDTLQQVQTALQHPKFSLENPNKARSLIGSFSRNVPHFHAQDGSGYRFIADKVIEIDRFNPQVAARLVQAFNLCNKLEPHRKNLVKQELQCIRAQEGLSKDVGEIVGKILG

SEQ ID NO: 3748 - protein, 638 aa, Neisseria
MKWDETRFGLEYDLDIFMVVAVGDFNMGAMENKGLNIFNTKFVLADSRTATDTDFEGIESVVGHEYFHNWTGNRVTCRDWFQLSLKEGLTVFRDQEFSGDRASRAVRRIENIRLLRQHQFPEDAGPTAHPVRPASYEEMNNFYTMTVYEKGAEVVRMYHTLLGEEGFQKGMKLYFQRHDGQAVTCDDFRAAMADANGINLDQFALWYSQAGTPVLEAEGRLKNNIFELTVKQTVPPTPDMTDKQPMMIPVKVGLLNRNGEAVAFDYQGKRATEAVLLLTEAEQTFLLEGVTEAVVPSLLRGFSAPVHLNYPYSDDDLLLLLAHDSDAFTRWEAAQTLYRRAVAANLATLSDGVELPKHEKLLAAVEKVISDDLLDNAFKALLLGVPSEAELWDGAENIDPLRYHQAREALLDTLAVHFLPKWHELNRQAAKQENQSYEYSPEAAGWRTLRNVCRAFVLRADPAHIETVAEKYGEMAQNMTHEWGILSAVNGNESDTRNRLLAQFADKFSDDALVMDKYFALVGSSRRSDTLQQVRTALQHPKFSLENPNKARSLIGSFSRNVPHFHAEDGSGYRFIADKVIEIDRFNPQVAARLVQAFNLCNKLEPHRKNLVKQALQRIRAQEGLSKDVGEIVGKILD

SEQ ID NO: 3749 - protein, 638 aa, Neisseria
MKWDETRFGLEYDLDIFMVVAVGDFNMGAMENKGLNIFNTKFVLADSRTATDTDFEGIESVVGHEYFHNWTGNRVTCRDWFQLSLKEGLTVFRDQEFSGDRASRAVRRIENIRLLRQHQFPEDAGPTAHPVRPARYEEMNNFYTMTVYEKGAEVVRMYHTLLGEEGFQKGMKLYFQRHDGQAVTCDDFRAAMVDANGINLDQFALWYSQAGTPVLDAQGRLKNNVFELTIKQTVPPTPDMADKQPMMIPVKIGLLNCNGEAVAFDYQGKRATEAVLLLTEAEQTFQFESVTEAVVPSLLRGFSAPVHLNYPYSDDDLLLLLAHDSDAFTRWEAAQTLYRRAVAANLAALSDGVELPKHEKLLAAVEKVISDDLLDNAFKALLLGVPSEAELWDGAENIDPLRYHQAREALLDILAVRFLPKWHELNRQAAKQENQSYEYSPEAAGWRTLRNVCRAFVLRADPAHIETVAEKYAEMAQNMTHEWGILSAVNGNESDTRNRLLAQFADKFSDDALVMDKYFALVGSSRRSDTLQQVQTALQHPKFSLENPNKARSLIGSFSRNVPHFHAEDGSGYRFIADKVIEIDRFNPQVAARLVQAFNLCNKLEPHRKNLVKQALQRIRAQEGLSKDVGEIVGKILD

SEQ ID NO: 3750 - protein, 867 aa, Neisseria
MSKTVRYLKDYQTPAYRILETELHFDIAEPQTVVKSRLTVEPQRAGEPLVLDGSAKLLSVKINGAAADYVLEGETLTIADVPSERFTVEVETEILPAENKSLMGLYASGGNLFTQCEPEGFRKITFYIDRPDVMSKFTTTIVADKKRYPVLLSNGNKIDGGEFSDGRHWVKWEDPFAKPSYLFALVAGDLAVTEDRFTTMSGRNVKIEFYTTEADKPKVGFAVESLKNAMKWDETRFGLEYDLDIFMVVAVGDFNMGAMENKGLNIFNTKFVLADSRTATDTDFEGIESVVGHEYFHNWTGNRVTCRDWFQLSLKEGLTVFRDQEFSGDRAGRAVRRIENIRLLRQNQFPEDAGPTAHPVRPVSYEEMNNFYTMTVYEKGAEVVRMYHTLLGEEGFQKGMKLYFQRHDGQAVTCDDFRAAMADANGINLDQFALWYSQAGTPVLEAEGRLKNNVFELTIKQTVPPTPDMADKQPMMIPVKVGLLNRNGEAVAFDYQGKRATEAVLLMTEAEQAFPLEGVTEAVVPSLLRGFSAPVYLNYPYSDDDLLLLLAHDSDAFTCWEAAQTLYRRAVAANLAALSDGIGLPKHEKLLAAVEKVISDDLLDNAFKALLLGVPSEAELWDGTENIDPLRYHQAREALLDTLAVRFLPKWHELDRQAAKQENQSYEYSPETADWRTLRNVCRAFVLRADPAHIETVAEKYGEMAQNMTHEWGILSAVNGNESDTRNCLLAQFADKFSDDALVMDKYFALIGSSRRSDTLQQVQTALQHPKFSLENPNKARSLIGSFSRNVPHFHAQDGSGYRFIADKVIEIDRFNPQVAARLVQAFNLCNKLEPHRKNLVKQELQCIRAQEGLSKDVGEIVGKILG

SEQ ID NO: 3751 - protein, 867 aa, Neisseria; identical to SEQ ID NO: 1958

SEQ ID NO: 3752 - protein, 867 aa, Neisseria
MSKTVHYLKDYQTPAYHILKTDLHFDINEPQTIVKSRLTVEPKRVGEPLVLDGSAKLLSVKINGVAADYVLEGETLTIADVPSERFTVEVETEILPAENKSLMGLYASAGNLFTQCEPEGFRKITFYIDRPDVMSKFTTTIVADKKRYPVLLSNGNKIDGGEYSDGRHWVKWEDPFAKPSYLFALVAGDLAVTEDYFTTMSGRNVKIEFYTTEADKPKVGFAVESLKNAMKWDETRFGLEYDLDIFMVVAVGDFNMGAMENKGLNIFNTKFVLADSRTATDTDFEGIESVVGHEYFHNWTGNRVTCRDWFQLSLKEGLTVFRDQEFSGDRASRAVRRIENIRLLRQHQFPEDAGPTAHPVRPARYEEMNNFYTMTVYEKGAEVVRMYHTLLGEEGFQKGMKLYFQRHDGQAVTCDDFRAAMVDANGINLDQFALWYSQAGTPVLDAQGRLKNNVFELTIKQTVPPTPDMADKQPMMIPVKIGLLNCNGEAVAFDYQGKRATEAVLLLTEAEQTFQFESVTEAVVPSLLRGFSAPVHLNYPYSDDDLLLLLAHDSDAFTRWEAAQTLYRRAVAANLAALSDGVELPKHEKLLAAVEKVISDDLLDNAFKALLLGVPSEAELWDGAENIDPLRYHQAREALLDILAVRFLPKWHELNRQAAKQENQSYEYSPEAAGWRTLRNVCRAFVLRADPAHIETVAEKYAEMAQNMTHEWGILSAVNGNESDTRNRLLAQFADKFSDDALVMDKYFALVGSSRRSDTLQQVQTALQHPKFSLENPNKARSLIGSFSRNVPHFHAEDGSGYRFIADKVIEIDRFNPQVAARLVQAFNLCNKLEPHRKNLVKQALQRIRAQEGLSKDVGEIVGKILD

SEQ ID NO: 3753 - protein, 179 aa, Neisseria
  VARIANT (1)...(179): Xaa = Any Amino Acid
MLCMNYQSNSGEGVLVAKTYLLTALIMSMVISGCQVIHANQGKVNTNSAVIAGADAHTPEHVTGLTEQKQVIASDFIVASANPLATQAGYDILKQGGSAADAMVAVQTTLSLVEPQSSGLGGGAFVLYWDNTAKTLTTFDGRETAPMRATPELFLDKDGXPLKFMEAVVARXVRLLSLN

SEQ ID NO: 3754 - protein, 181 aa, Neisseria
MPCMNHQSNSGEGVLVAKTYLLTALIMSMTISGCQVIHANQGKVNTHSAVITGADAHTPEHATGLTEQKQVIASDFMVASANPLATQAGYDILKQGGSAADAMVAVQTTLSLVEPQSSGLGGGAFVLYWDNTAKTLTTFDGRETAPMRATPELFLDKDGQPLKFMEAVVVVARWVRLLSLN

SEQ ID NO: 3755 - protein, 181 aa, Neisseria; identical to SEQ ID NO: 3754

SEQ ID NO: 3756 - protein, 270 aa, Neisseria
MRFVFCLGGEIVSDPCDFHLVFVRVESAADQTETQIHQIRIHGIGFAIIADFLQRARVERFPHFAAVHTQLARKAAQFRHIVQRHIRPRLVKREQIHQIAVALVITADVVVPLEIAAVAEIAVARIPIARGVDAVYQGAVMQYGQVETAAVPADQLRRMFFNQFEKLGNHDFFAIVHLADGADMNLVLPPAHTAGNRHNLMEVVLHKIAAGLCAAFLLREQHHFVIRQGRRQVIQRTDTLHIGYGFNIESQNRIHGSTLHSKTDLRLLCH

SEQ ID NO: 3757 - protein, 224 aa, Neisseria
MRLFPGLCGQVIPHPFDFHFVFVRIQPAADQTETQVHQISVCRVGFAIIADFLQPARMECLPNLAAVHTQLARKTAQFRHIVQRHVCPRLVKREQIHQIAVALVITADVVVPLEIAAVAEIAVAHIPIARGVDAVYQGAVMQYGQIETAAVPTDQLRRMFFNQFEKFSNDHFLAVIHLADGADMYFILPPTHAARNRHNLMKMMLHKIAARLSTAFVLGNQHHL

SEQ ID NO: 3758 - protein, 269 aa, Neisseria
  VARIANT (1)...(269): Xaa = Any Amino Acid
MRFVFCLGGEIVSDPLDFHFVFVCVESAADQTETQIHQIGIYRIGFAIIADFLQPARVERLPHLAAVHTQLARKTAQFRHIVQRHIRPRLVKREQIHQIAMTLVVAADVVVPLEIAAVAEIAVAHIPIARGVDAVQRTVMQNRQVETAAVPTDQLRRMFFNQLEKFGDNHFLAVIHLADCTDMDFILPPTHAARNRHNLMKMMLHKIPTRLSTAFLLGKQHHFIVGQRGRQVIQRTDTLHIGYGFNIESQNRGHDSTLYLKXDLRLLCH

SEQ ID NO: 3759 - protein, 106 aa, Neisseria
MRRIVKKHQPVNAPHIVLEIRIMKLHRAFVFLGRKRPHHHDRSLRRQHGIEGMGFDFKQIFRHVQSSNRQSGRQPVCTKPPNTASLQTALSRPAVFGYNADIKRIL

SEQ ID NO: 3760 - protein, 106 aa, Neisseria
MRRIIKKHQPINAPHIVLEIRIMKLHRAFVFLGRKRPHHHDSSLRRQHGIEGMGFDFKQIFRHVQSSNRQNGRQPVCTKPPNTASLQTALSRPAVFGYNADIKRIL

SEQ ID NO: 3761 - protein, 106 aa, Neisseria
MRRIIKKHQPVNAPHIVLEIRIMKLHRAFVFLGRKRPHHHDRSLRRQHGIEGMGFDFKQIFRHVQSSNRQNGRQPVCTKPPNTASLQTALSRPAVFGYNADIKRIL

SEQ ID NO: 3762 - protein, 151 aa, Neisseria
MTCCRNCLARSCFGLVKNASGVSSSRICPLSTKITRSATSRANPISWVTHIIVMPLSAKSFITFNTSPTISGSSAEVGSSNSITRGSIASPRAIATRCCWPPESWEGKASFLCASPTRSKSSIAFFSACSAFCPLTFIGARVMLSNTVRCG

SEQ ID NO: 3763 - protein, 151 aa, Neisseria
MTCCRNCLARSCFGLVKNASGVSSSRICPLSTKITRSATSRANPISWVTHIIVMPLSAKSFITFNTSPTISGSSAEVGSSNNITRGSIAKPRAIATRCCWPPESWEGKASFLCASPTRSKSSIAFFSACSAFCPLTFIGARVMFSNTVRCG

SEQ ID NO: 3764 - protein, 150 aa, Neisseria
MTCCRNCLARSCFGLVKNASGVSSSRICPLSTKITRSATSRANPISWVTHIMVIPLSAKSFITFNTSPTISGSSAEVGSSNNITRGSIAKPRAIATRCCWPPESWEGKASFLCASPTRSKSSIAFFSACSAFPLTFIGARVMFSNTVRCG

SEQ ID NO: 3765 - protein, 148 aa, Neisseria
MISRVTIKTPFNAPNTPPKMRLAKPRPTAETAPVSSERSIFWIRQAMTNREMNDRANANRRGWNEAKARSAKGAAKSLAKKKETTHATIEPASAITPRIVEMTMQAAMTAEARRSAMGRLFIRYLAGDAVHAQFVQIAFGIPCVFIVA

SEQ ID NO: 3766 - protein, 148 aa, Neisseria
MTSRVTIKTPFNAPNTPPKMRLAKPKPTAETALVSSERSIFWIRQAMTNREMNDRANANRRGWNEAKARSAKEAAKSLAKKKETTHAAIEPASAITPRIADSTMQAAMTAETRRSAMGRLFIRYLTGDTVYAQFVQIAFGIPCVFIVA

SEQ ID NO: 3767 - protein, 148 aa, Neisseria
MTSRVIIKMPFNAPNTPPKMRLAKPKPTAETAPVSSERSIFWIRQAMTNREMNDRANANRRGWNDAKAMSAKGAAKSLAKKKATTHAAIEPASAITPRIADSTMQAAMMAETRRSATGRLFIRYLTGDTVYAQFVQIAFGIPCVFIVA

SEQ ID NO: 3768 - protein, 208 aa, Neisseria
MRKIRTKICGITTPEDALYAAHAGADALGLVFYPQSPRAIDIIKAQKIAAALPPFVSVVALFVNESAQNIRRILAEVPIHIIQFHGDEDDAFCRQFDRPYIKAIRVQTASDIRNAATRFPNAQALLFDAYHPSEYGGTGHRFDWTLLAEYSGKPWVLAGGLTPENVGEAVRITGAEAVDVSGGVEASKGKKDPAKVAAFIATANRLSR

SEQ ID NO: 3769 - protein, 208 aa, Neisseria; identical to SEQ ID NO: 1263

SEQ ID NO: 3770 - protein, 208 aa, Neisseria
MRKIRTKICGITTPEDALYAAHAGADALGLVFYPQSPRAVDIIKAQKITAALPPFVSVVALFVNESAQNIRRILAEVPIHIIQFHGDEDDAFCRQFHRPYIKAIRVQTASDIRNAADRFPDAQALLFDAYHPSEYGGTGHRFDWTLLAEYSGKPWVLAGGLTPENVDEAIRITGAEAVDVSGGVEASKGKKDPAKVAAFIATANRLSR

SEQ ID NO: 3771 - protein, 307 aa, Neisseria
MDIETFLAGERAAGGYRCGFVAIVGRPNVGKSTLMNHLIGQKISITSKKAQTTRNRVTGIYTDDTAQFVFVDTPGFQTDHRNALNDRLNQNVTEALGGVDVVVFVVEAMRLTDADRVVLKQLPKHTPVILVINKIDKDKAKDRYALEAFVAQVRAEFEFAAAEAVSAKHGLRIANLLELLKPYLPESVPMYPEDMVTDKSARFLAMEIVREKLFRYLGEELPYAMNVEVEQFEEGDGLNRIYIAVLVDKESQKAILIGKGGERLKKISTEARLDMEKLFDNKVFLKVWVKVKSGWADDIRFLRELGL

SEQ ID NO: 3772 - protein, 307 aa, Neisseria
MDIETFLAGERAAGGYRCGFVAIVGRPNVGKSTLMNHLIGQKISITSKKAQTTRNRVTGIYTDDTAQFVFVDTPGFQTDHRNALNDRLNQNVTEALGGVDVVVFVVEAMRFTDADRVVLKQLPKHTPVILVVNKIDKDKAKDRYALEAFVAQVRAEFEFAAAEAVSAKHGLRIANLLELIKPYLPESVPMYPEDMVTDKSARFLAMEIVREKLFRYLGEELPYAMNVEVEQFEEEDGLNRIYIAVLVDKESQKAILIGKGGERLKKISTEARLDMEKLFDTKVFLKVWVKVKSGWADDIRFLRELGL

SEQ ID NO: 3773 - protein, 307 aa, Neisseria
MDIETFLAGERAADGYRCGFVAIVGRPNVGKSTLMNHLIGQKISITSKKAQTTRNRVTGIYTDDTAQFVFVDTPGFQTDHRNALNDRLNQNVTEALGGVDVVVFVVEAMRFTDADRVVLKQLPKHTPVILVVNKIDKDKAKDRYALEAFVAQVRAEFEFAAAEAVSAKHGLRIANLLELIKPYLPESVPMYPEDMVTDKSARFLAMEIVREKLFRYLGEELPYAMNVEVEQFEEEDGLNRIYIAVLVDKESQKAILIGKGGERLKKISTEARLDMEKLFDTKVFLKVWVKVKSGWADDIRFLRELGL

SEQ ID NO: 3774 - protein, 141 aa, Neisseria
MKTARRRSRELAVQAVYQSLINRTAAPEIAKNIREMSDFAKADEELFNKLFFGTQTNAADYIQKIRPLLDRDEKDLNPIERAVLLTACHELSAMPETPYPVIINEAIEVTKTFGGTDGHKFVNGILDKLAAQIRPDEPKRR

SEQ ID NO: 3775 - protein, 141 aa, Neisseria; identical to SEQ ID NO: 1258

SEQ ID NO: 3776 - protein, 141 aa, Neisseria
MKTARRRSRELAVQAVYQSLINRTAAPEIAKNIREMPDFAKADEELFNKLFFGTQTNAAEYIRQIRPLLDRDEKDLNPIERAVLLTACHELSAMPETPYPVIINEAIEVTKTFGGTDGHKFVNGILDKLAAQIRPDEPKRR

SEQ ID NO: 3777 - protein, 158 aa, Neisseria
MNTIAPNLDGKHLRIGIVQARFTNEIGSQMLKVCCRTLQELGVADENITVATVPGALEIPIALMNFASSEKFDALIAIGVVIRGETYHFELVANESGAGIGRVALDYNIPIANAVLTTENDAQAIERIGEKASDAAKVAVECANLVNLLLEEQFEDEE

SEQ ID NO: 3778 - protein, 158 aa, Neisseria; identical to SEQ ID NO: 1259

SEQ ID NO: 3779 - protein, 158 aa, Neisseria; identical to SEQ ID NO: 1259

SEQ ID NO: 3780 - protein, 198 aa, Neisseria
MPQILVRIFLIRYSFIWETVRLCRFRRHSRSVDFDVFDRKDFNFLTAFRRVQNHFVAFARFNQATRQRRNPRNFVLRGIDFIDADDFDGLLAPVAAQQTDGRAEKYLVGRFAQFGIDDDGSLQTFGQETDAAVDFAHTAFAVKIVAVFAAVAVACRPVDDLDDFGAFFIDQLIKLVFQCLPSGGRNVVFGFGTHIVCG

SEQ ID NO: 3781 - protein, 198 aa, Neisseria
MPQILVRIFLIRYSFIWETARFCRFRRHSRSVDFDVFDRKDFNFLTPFRRVQNHFVAFARFNQTTSQRRNPRNFVLRGIDFIDADDFDGLLAPVVAQQSDRRAEKHLVGRFAQFGIDDDGSLQTFGQETDAAVDFAHTAFAVKIVAVFAAVAVACRPVDDLDDFGAFFVDQLIKLVFQCLPSGGRNVVFGFGTHIVCG

SEQ ID NO: 3782 - protein, 197 aa, Neisseria
MPQILVRIFLIRYSFIWETARLCRFRRHSRSVDFDVFDRKDFNFLTPFRRVNHFVAFTRFNQTTSQRRNPRNFVLRGIDFIDADDFDGLLAPVAAQQTDGRAEKHLVGRFAQFGINDDGGFQTLGQETDAAVDFAHTAFAVKVVAVFAAVAVACRPVDDLDDFGAFFINQLIKLVFQCLPSGGRNVVFGFGTHIVCG

SEQ ID NO: 3783 - protein, 165 aa, Neisseria
MNSLPIADLLASAVIAACIVISTMRGVIAEAGSMVAWVVSFFFAKLFAAPFADLAFASFQPRLFALALSFISLFVIACLIQKMLRSLLTGAVSAVGLGFANRILGGVFGALKGVLIVTLLIMLASKTDLPDTEEWQQSYTVPFFVSLSEAVLNHTDNAPESLDDD

SEQ ID NO: 3784 - protein, 165 aa, Neisseria; identical to SEQ ID NO: 1266

SEQ ID NO: 3785 - protein, 165 aa, Neisseria
MNNLPVADLLVSAIIAACIVLSAMRGVIAEAGSMAAWVVAFFFAKLFAAPFADIAFASFQPRLFALALSFISLFVIACLIQKILRSLLTGAVSAVGLGFANRILGGVFGALKGILIITLLVMLASKTDLPDTEEWRQSYTLPFFVSLSEAVLNHSGGTAETPEDD

SEQ ID NO: 3786 - protein, 220 aa, Neisseria
MTKGSSAMSSPRAAISVATRTRRLPSLKALSVSSLLCWERSPCIACADRLRRTSSRVTRSTLCLVLQKTITWFICRSTISRSSRLRFWKVSTAMMCCSTLALVVFWAATSTVSGAFMKSCASLRIGAEKVAEKSRVWRWRGSICMILRMSSINPISNMRSASSRTTISALFKLMFFCFTWSSSRPTVATTISQPARRSAVCLSMLTPPKRTVCRSGRFLM

SEQ ID NO: 3787 - protein, 219 aa, Neisseria
MTKGSSAMSSPRAAMSVATRTRRLPSLKALSVSSRLCWERSPCIACADRLRRTSSRVTRSTLCLVLQNTMTWFICKSTISRSSRLRFMVSTAMMCCSTLALVVFCAATSTVSGAFMKSCASLRIGAEKVAEKSRVWRWRGSICMILRMSSIKPISSIRSASSKTTISTLFKWMFFCFTWSSSRPTVATTISQPARRSAVCLSIFIPPNKTVWRSGRFLM

SEQ ID NO: 3788 - protein, 219 aa, Neisseria
MTKGSSAISSPRAAISVATRTRRLPSLKALSVSSRLCWERSPCIACADRLRRTSSRVTRSTLCLVLQNTMTWFICKSTISRSSRLRFMVSTAMMCCSTLALVVSCAATSTVSGAFMKSCASLRIGAEKVAEKSRVWRWRGSICMILRMSSIKPISSIRSASSKTTISTLFKWMFFCFTWSSSRPTVATTISQPARRSAVCLSIFIPPNKTVWRSGRFLM

SEQ ID NO: 3789 - protein, 261 aa, Neisseria
MTTPMAISASNFSEEAKFISAMGISSAPGTVATVMFSSATPNSWRVRQQTLSIWLPISLVKRACTMPMRRCLPSRLGAMVFIGCPLVFGVSECRLKVSVLRLPVGNGLECAVFGKLPRAAFGLGKQCGGFRVGFGDVGEADDAEVVGVVGVFVGFVAAEETPAAVVFKNGGFAVKEADGPVLFGDGVGGDAAVECRGKCLCKCVHCGNTLGGGKLADFTTIPALSADGGGLVVQCAPFAALRCFCIFGVWKRIRAVFCGRR

SEQ ID NO: 3790 - protein, 260 aa, Neisseria
  VARIANT (1)...(260): Xaa = Any Amino Acid
MTTPMAISASNFSEEAKFISAMGISSAPGTVATVMFSSATPNSWRVRQQTLSISLPISLVKRACTMPMRRCLPSRLGAMVFIGCPLVFGVSECRLKVSVLRLPVGDGLECAVFGKLPCAAFGLGEQCGGFRVGFGDVGEADDAEVVRIVGVFVGLVAAEETPAAVVFKNGGFAVEEADGPVLFGDGVGGDTAVECRGKCLCKCVHYGNTLGXKLTDFTTIRALSADGGGLVVQCAPFAALRCFCIFGVWKRIRAVFCGRR

SEQ ID NO: 3791 - protein, 260 aa, Neisseria
  VARIANT (1)...(260): Xaa = Any Amino Acid
ITTPMAISASNFSEEAKFISAMGISSAPGTVATVMFSSATPNSWRVRQQTLSISLPISLVKRACTMPMRRCLPSRLGAMVFIECPLVFGGFGMPSEGSVLRLPVGDGLECAVFCQFPRAAFRLGEQCGGFRVGFGDIGEADDAEVVRVVGVFVGLVAAEETPAAVVFKNGGFAVEEADGLVLFGDGVGGDAAVECRGKCLCKCVHCGNTXGGKLADFTTILALSADGGGLVVQCAPFAALRCFCIFGVWKRIRAVFCGRR

SEQ ID NO: 3792 - protein, 133 aa, Neisseria
MRDFAVWVPYGERRKNWDIRYCLPHLIRLSPTRLRKCGRILSGICEPFCLITPDLTMHYCPILILIDYICVNDEIKMPSEPDWIQTAFCMAGFIRFPTDRPILTRQSGVVRISPRTGFRYPTRSLPKSKKAYG

SEQ ID NO: 3793 - protein, 129 aa, Neisseria
MRDFTVWVSYGKWRKNWDIRYCLLHLIHLSSTRLRKCGRILSGICEPFCLITPDLTMHYCPILILIDYEMAMPSEPDWIQTAFCMAYGFIRFPTDRPIRTRQSGVVRISPRTGFRYPTRSLPKSKKAYG

SEQ ID NO: 3794 - protein, 109 aa, Neisseria
MRDFTVWVSYGKWRKNWDIRYCLLHLIHLSSTRLRKCGRILSGICEPFCLITPDLTMHYCPILILIEYYIRFPTDRPILTRPTGVVRISPRTGFRYPTRSLPKSKKAYG

SEQ ID NO: 3795 - protein, 146 aa, Neisseria
MIKETLMRPIFLSFVLLPILITACSTPDKSARWENIGTISNGNIHTYINKDSVRKNGNLMIFQDKKVVTNLKQERFANTPAYKTAIAEWEIHCNNKTYRLSSLQLFDTKNTEISTQNYTASSLRPMSILSGTLTEKQYETVCGKKL

SEQ ID NO: 3796 - protein, 146 aa, Neisseria
MIKETLMRPIFLSFVLFPILITACSTPDKSARWENIGTISNGNIHTYINKDSVRKNGNLMIFQDKKVVTNLKQERFANTPAYKTAIAEWEIHCNNKTYRLSSLQLFDTKNTEISTQNYTASSLRPMSILSGTLTEKQYETVCGKKL

SEQ ID NO: 3797 - protein, 146 aa, Neisseria
  VARIANT (1)...(146): Xaa = Any Amino Acid
MIKETLMRPIFLSFVLFPILITACSTPDKSARWENIGTISNGNIHTYINKDSVRKNGNLMIFXDKKVVTNLKQERFAXTPAYKTAIAEWEIHCNNKTYRLSSLQLFDTKNTEISTQXYTASSLRPMSILSGTLTEKQYETVCGKKL

SEQ ID NO: 3798 - protein, 172 aa, Neisseria
MRLFPIAAALTLAACGTVQSTQYFVLPDSRYIRPATQGGETAVEVRLAEPLKRGGLVYQTDPYRINTAQNHVWADTLDDMLEAALSNAFNRLDSTRTFVPASRSGSTDKWTVYIDAFQGSYTGKTLISGYAVLPDGTNRPFHIETEQQGDGYAAMTAALEQGLKQAAQQMVE

SEQ ID NO: 3799 - protein, 172 aa, Neisseria; identical to SEQ ID NO: 2206

SEQ ID NO: 3800 - protein, 172 aa, Neisseria
MRLFPIAAALTLAACGTVQSTQYFVLPDSRYIRPATQGGETAVEVRLAEPLKRGGLVYQTDPYRLNTAQNHVWADTLDDMLEAALSNAFNRLDSTRIFVPASRSGSTEKWTVYIDAFQGSYTGKTLISGYAVLPDGTNRPFHIETEQQGDGYAAMTAALEQGLKQAAQQMVE

SEQ ID NO: 3801 - protein, 357 aa, Neisseria
LFCRIGNFAFCGVVSAGCLLNNKHSYSYAKEPHTVKPRFYWAACAVLPAACSPEPAAEKTVSAASQAASTPVATLTVPTARGDAVVPKNPERVAVYDWAALDTLTEPGVNVGATTAPVRVDYLQPAFDKAATVGTLFEPDCESLHRHNPQFVITGGPGAEAYEQLAKNATTIDLTVDNGNIRTSGEKQMETLSRIFGKEARVAELNAQIDALFAQKREAAKGKGRGLVLSVTGNKVSAFGTQSRLASWIHGDIGLPPVDESLRNEGHGQPVSFEYIKEKNPGWIFIIDRTAAIGQEGPAAVEVLDNALVCGTNAWKRKQIIVMPAANYIVAGGARQLIQAAEQLKAAFEKAEPVAAQ

SEQ ID NO: 3802 - protein, 355 aa, Neisseria
LFCRIGNFAFCGVVSAGCLLNNKHSYSYAKEPHTVKPRFYWAACAVLLTACSPEPAAEKTVSAASASAATLTVPTARGDAVVPKNPERVAVYDWAALDTLTELGVNVGATTAPVRVDYLQPAFDKAATVGTLFEPDYEALHRYNPQLVITGGPGAEAYEQLAKNATTIDLTVDNGNIRTSGEKQMETLARIFGKEARAAELKAQIDALFAQTREAAKGKGRGLVLSVTGNKVSAFGTQSRLASWIHGDIGLPPVDESLRNEGHGQPVSFEYIKEKNPDWIFIIDRTAAIGQEGPAAVEVLDNALVRGTNAWKRKQIIVMPAANYIVAGGARQLIQAAEQLKAAFKKAEPVAAGKK

SEQ ID NO: 3803 - protein, 355 aa, Neisseria
LFCRIGNFAFCGVVSAGCLLNNKHSYSYAKEPHTVKPRFYWAACAVLLTACSPEPAAEKTVSAASASAATLTVPTARGDAVVPKNPERVAVYDWAALDTLTELGVNVGATTAPVRVDYLQPAFDKAATVGTLFEPDYEALHRYNPQLVITGGPGAEAYEQLAKNATTIDLTVDNGNIRTSGEKQMETLARIFGKEARAAELKAQIDALFAQTREAAKGKGRGLVLSVTGNKVSAFGTQSRLASWIHGDIGLPPVDESLRNEGHGQPVSFEYIKEKNPDWIFIIDRTAAIGQEGPAAVEVLDNALVRGTNAWKRKQIIVMPAANYIVAGGSRQLIQAAEQLKEAFEKAEPVAAGKE

SEQ ID NO: 3804 - protein, 131 aa, Neisseria
NFSCRADDVFDDICSAVEGFGGIARSVQLGAVSGGAFESVAYSLRQHSAGIVETVGKPLSGAAVVGQVEADILGNAFYVVAVYIPRAFGSGIAAALWPVIAVGGMVFVSVPMDAVKAESVNGTTGFVRIGM

SEQ ID NO: 3805 - protein, 163 aa, Neisseria
  VARIANT (1)...(163): Xaa = Any Amino Acid
MMLKKFVLGGIAALVLAACGGSEGGSGAXXXXNFSCSADDVFNDICSAVEGFGGIARSVQLGAVSGGAFESVAYSLRQHTTGIVETVGKPLSGAAVVGQVEADILGNAFYVVAVYIPRAFGSGIAAALWPVIAVGGMVFVSVPMDAVKAKSVNGTTGFIRIGM

SEQ ID NO: 3806 - protein, 131 aa, Neisseria
NFSCRADDVFDDICSAVESFGGIARSVQLGAVSGGAFESVAYSLRQHTTGIVETVDKPLSGAAVVGQVEADILGNAFYVVAVYIPRAFGSGIAAALWPVIAVGGMVFVSVPMDAVKAESVNGTTGFIRIGM

SEQ ID NO: 3807 - protein, 234 aa, Neisseria
MKSRHLALALGVAALFALAACDSKVQTSVPADSAPAASAAAAPAGLVEGQNYTVLANPIPQQQAGKVEVLEFFGYFCPHCARLEPVLSKHAKSFKDDMYLRTEHVVWQKEMLPLARLAAAVDMAAAESKDVANSHIFDAMVNQKIKLQEPEVLKKWLGEQTAFDGKKVLAAYESPESQARAGKMQELTETFQIDGTPTVIVGGKYKVEFADWESGMNTIDLLADKVREEQKAAQ

SEQ ID NO: 3808 - protein, 232 aa, Neisseria; identical to SEQ ID NO: 867

SEQ ID NO: 3809 - protein, 232 aa, Neisseria
MKSKHLALGVAALFALAACDSKVQTSVPADSAPAASAAAAPAGLVEGQNYTVLANPIPQQQAGKVEVLEFFGYFCPHCAHLEPVLSKHAKSFKDDMYLRTEHVVWQKEMLTLARLAAAVDMAAADSKDVANSHIFDAMVNQKIKLQEPEVLKKWLGEQTAFDGKKVLAAYESPESQARADKMQELTETFQIDGTPTVIVGGKYKVEFADWESGMNTIDLLADKVREEQKAAH

SEQ ID NO: 3810 - protein, 138 aa, Neisseria
VLHTSRFAQKGSPVNKTLILALSALFSLTACSVERVSLFPSYKLKIIQGNELEPRAVAALRPGMTKDQVLLLLGSPILRDAFHTDRWDYTFNTSRNGIIKERSNLTVYFENGVLVRTEGDALQNAAEALRAKQNADKQ

SEQ ID NO: 3811 - protein, 139 aa, Neisseria
VLHYPSRFAQKGISVNKTLILALSALLGLAACSAERVSLFPSYKLKIIQGNELEPRAVAALRPGMTKDQVLLLLGSPILRDAFHTDRWDYTFNTSRNGIIKERSNLTVYFENGVLVRTEGDVLQNAAEALKDRQNTDKP

SEQ ID NO: 3812 - protein, 139 aa, Neisseria
VLHYPSRFAQKGISVNKTLILALSALLGLAACSVERVSLFPSYKLKIIQGNELEPRAVASLRPGMTKDQVLLLLGSPILRDAFHTDRWDYTFNTSRNGIIKDRSNLTVYFENGVLVRTEGNALQNAAEALRVKQNADKQ

SEQ ID NO: 3813 - protein, 399 aa, Neisseria
SPPLPPMSGKLMAVLMAVLVALMPFSIDAYLPAIPEMAQPLNADIHRIESLSLFMFGTAFGQVAGGAVSDIKGRKPVALTGLIVYCLAVAAIVFASSTEQLLNLRAVQAFGAGMAVVIVGAMVRDYYSGRKAAQMFALIGIILMVVPLAAPMVGALLQGLGGWRAIFVFLAAYSPVLPGLVQYFLPNPAVGGKIGRDVFGLVAGRFKRVLKTRAAMGYLFFQAFSFGSMFAFLTESSFVYRQLYHVTPHRYAWVFALNIITMMFFSRVTAWRLKTGAHPQSILLRGIVVQFAANPSQLAAVLFFGLPPFWLPVACVMFSVGTQGLVGADTQACFMSYFKEEGGSANAVSGVFRSLIGAGVVMAATVMAATMTASASCGIALLWLCSHKAWKENEKKRIL

SEQ ID NO: 3814 - protein, 459 aa, Neisseria
LLIHYIVPVRPVLPGLLLPPVCAGVLKFSVSAYCVFRRRAVCLRIGREFMPSAHYPEMSEKLMAVLMAMLVTLMPFSIDAYLPAIPEMAQSLNADVHRIEQSLSLFMFGTAFGQVVGGSVSDIKGRKPVALTGLIVYCLAVAAIVFVSSAEQLLNLRVVQAFGAGMTVVIVGAMVRDYYSGRKAAQMFALIGIILMVVPLVAPMVGALLQGLGGWQAIFVFLAAYSLVLLGLVQYFLPKPAVGGKIGRDVFGLVAGRFKRVLKTRAAMGYLFFQAFSFGSMFAFLTESSFVYQQLYRVTPHQYAWAFALNIITMMFFNRVTAWRLKTGVHPQSILLWGIVVQFAANLSQLAAVLFFGLPPFWLLVACVMFSVGTQGLVGANTQACFMSYFKEEGGSANAVLGVFQSLIGAGVGMAATFLHDGSATVMAATMTASTSCGIALLWLCSHRAWKENGQSEYL

SEQ ID NO: 3815 - protein, 459 aa, Neisseria
LLIHYIVPVRPVLPGLLLPPVCAGVLKFSVSAYCVFRRRAVCLRIGREFMPSAHYPEMSEKLMAVLMAMLVTLMPFSIDAYLPAIPEMAQSLNADVHRIEQSLSLFMFGTAFGQVVGGSVSDIKGRKPVALTGLAVYCLAVAAIVFASSAEQLLNLRVVQAFGAGMTVVIVGAMVRDYYSGRKAAQMFALIGIILMVVPLVAPMVGALLQGLGGWQAIFVFLAAYSLVLLGLVQYFLPKPAVGGKIGRDVFGLVAGRFKRVLKTRAAMGYLFFQAFSFGSMFAFLTESSFVYQQLYHVTPHQYAWAFALNIITMMFFNRITAWRLKTGVHPQSILLWGIVVQFAANLSQLAAVLFFGLPPFWLLVACVMFSVGTQGLVGANTQACFMSYFKEEGGSANAVLGVFQSLIGAGVGMAATFLHDGSATVMAATMTASTSCGIALLWLCSHRAWKENGQSEYL

SEQ ID NO: 3816 - protein, 269 aa, Neisseria
MKNKTSSLPLWLAAIMLAARSPSKEDKTKENGASAASSSASSASSQTDLQPAASAPDNVKQAESAPLNCTGLHPAAGIGDLIQQIAEHIDSDCLFALSHNELETRFGLPGGGYDNIQRLLFPDIRPEDPDYHQKIMLAIEDLRYGTRTISRQAQDAIMEQERRLREATLMLTQGSQKTRGQGEEPKRARYFEVSATSAYLNRHNNGLGGNFQYIGQLPGYLKMHGEMLENQSLFRLSNRERNPDKPFLDIHFDENGKITRIVVYEKNIY

SEQ ID NO: 3817 - protein, 278 aa, Neisseria; identical to SEQ ID NO: 1508

SEQ ID NO: 3818 - protein, 281 aa, Neisseria
MKNKTSSLLLWLAAMMLTACSPSKEDKTKENGASAASSTASAASSSAPQTDLQPAASAPDNVKQAESVPPSNCTDLHPATGIDDLMQQIAEHIDSDCLFALSHHELETRFGLPGGGYDNIQRLLFPDIRPEDPDYHQKIILAIEDLRYGKRTISRQAQDALMEQERRLREATLLLIQGSQETRGQGEEPKRTRYFEVSATPAYSSRHNNGLGGNFQYIGQLPGYLKIHGEMLENQSLFRLSNRERNPDKPFLDIHFDENGKITRIVVYEKNIYFNPNLGRR

SEQ ID NO: 3819 - protein, 144 aa, Neisseria
VPLPAPCRFAKPAASFLSMALLSCQLSHAATAYIPPNDFQPNCDIRRLGLTQGQHNELRKIRAAFKMAGDRARLKVMHSEHSRRRSVVEIISSDVFNRNEARDYVESRYHSSMDFAVDELEIQHRFFHILTPQQQQMWLSSCLK

SEQ ID NO: 3820 - protein, 144 aa, Neisseria
VPLPAPCRFAKPAASFLSMALLSCQLSHAATAYIPPNDFQPNCDIRRLGLTQSQHNELRKIRTAFKMAGDRARLKVMHSEHSRRRSVVEIISSDVFNRNEARDYVESRYLSGMDFAVDELEIQHRFFHILTPQQQQMWLSSCLK

SEQ ID NO: 3821 - protein, 144 aa, Neisseria
  VARIANT (1)...(144): Xaa = Any Amino Acid
VPLXAPCRFAKPAASFLSMALLSCQLSHAATAYIPLNDFQPNCDIRRLGLTQGQHNELRKIRAAFKMAGDRARLKVMHSEHSRRRSVVEIISSDVFNRNEARDYVESRYLSGMDFAVDELEIQHRFFHILTPQQQQMWLSSCLK

SEQ ID NO: 3822 - protein, 337 aa, Neisseria
VSHTRCRCSESIRRIWRNGREWRIKGQKCRLNTDAVQTASFYTTALFGCAFIPCGRVFVALEAFVRVGFERVGVIGLGYVFKPLAVFVGGFDGRPVDIGKARLLEQGFGQLHAAAYGVVAVDDGKIHVGAAARQLCGFKLDDFDVFQVFRDVGFGCGQRIDAVFEFDPTQFVQHHQGACEVGRVVGRGYGAAVFDFFQRFQFARIQSQRRGRHLEGFGDVQVVFFFEIVKIGFVLEDVDVQLALRQCQIRAHIVGKFDQFDGVAFFLQLGLDLFFDHIAEVAHGRAEDDFFFRRAVIGRRGGGRGCGRAVFLTAAGCEDERECGGGKGFEEGFHIFS

SEQ ID NO: 3823 - protein, 336 aa, Neisseria
VLHTLCRCSESIRRIRRNGREWRIKGQKCRLNTDTVQTASFYTTALFGCAFIPCGRGFVALEAFVRVGFERVGVIGLGYVFKPLAVFVGGFDGRPVDIGKARFLEQGFGQLHAAAYGVVAVDDGKIHVGAATRQLRGFKLDDFDVFQVLGDVRFGCGQRIDAVFEFDPTQFVEHHQDAGEVGRVVGRGYGAAVFDFFQRFQLARVQSQRRGRHLEDFGDVQIVFFFEVVKIGFVLEDVDVQLALSQCQIRAYIVGKLDQFDGVAFFLQLGLDLFFDHIAEVADGRAEDDFFFRRAVVGGGRSGCGGRAVFLTAAGGEDERECGGGKGFEEGFHIFS

SEQ ID NO: 3824 - protein, 336 aa, Neisseria
VLHTLCRCSESIRRIRRNGREWRIKGQKCRLNTDTVQTASFYTTALFGCAFIPCGRGFVALEAFVRVGFERVGVIGLGYVFKPLAVFVGGFDGRPVDIGKARFLEQGFGQLHAAAYGVVAVDDGKIHVGAATRQLRGFKLDDFDVFQVFGNVRFGCGQRIDAVFEFDPTQFVEHHQDAGEVGRVVGRGYGAAVFDFFQRFQLARVQSQRRGRHLEDFGDVQIVFFFEVVKIGFVLEDVDVQLALSQCQIRAHIVGKLDQFDGVAFFLQLGLDLFFDHIAEVADGRAEDDFFFRRAVVGGGRSGCGGRAIFLTAAGGEDERECGGGKGFEEGFHIFS

SEQ ID NO: 3825 - protein, 372 aa, Neisseria
  VARIANT (1)...(372): Xaa = Any Amino Acid
SAFVLPKHPMPALTPASTFAQIGFGFALAAQLLGQDEHDAFFRAPPFAHGFMPPSAYGCQYFPHQHFGRGRACRYADFAFAFKPRALQVGRVVHHIRIDSARCRHFAQAVAVGRIGRTDHNHDVALFRQLFDGGLPVGRRIADVFLVRIADIGETRVQRGDDVFGFIDRERGLADIGEFVGVSDFEFCHISDRFDQKHFARCKLPHRAFDLGVPLMPDHDDFTVLGIQSGDFLMHFRHQRASRIKYPETALRRFLLHRLRYAVCRINQCRARRHFRQVFDKHRAFFAQVVHDEFVVDDFVAHINRRAEFFQSTFDNTDCPIHTGAEAARIGKDDGFSVHKFCIPCSDGIHVFLLXLCDGRYCQAPPTPHRRR

SEQ ID NO: 3826 - protein, 385 aa, Neisseria
LVSASGTRQKCRLKPVQTAFVLPKHSTPASTFAQIGFGFALAAQLFGQDEHNAFFRTLAFAYGFVPPSAYGCQYFPHQHFGRGRACRYADFVFALKPCALQVACIIHHIRIDSARCRHFAQAVAVGRIGRTDHNHDVALFCQLFDGGLPVGRRIADIFLVRIADIGETRVQRGDDVFGFIDRERGLADIGEFVGVSDFEFCHISDRFDQKHFARRKLPHRSFDLDVPLMPDHDDFTVLGIQSGDFLMHFRHQRASRIKHAETALRRFLPHRLRYAVCRINQCRARRHFRQVFNKHRTFFTQVVHDEFVVNDFVAHINRRAELFQSTFDNTDCPIHTSAEAARIGKDDGFLVHKPGISFSDGINIFLLGFYGGRCCPTPPTPHRRR

SEQ ID NO: 3827 - protein, 385 aa, Neisseria; identical to SEQ ID NO: 3826

SEQ ID NO: 3828 - protein, 304 aa, Neisseria
LPQTRPARRHHRHRQYFVERKGDARSGFCAAQCQNSQRFQSKPAERYADCPHHPARRRRFDPASEKIMKTKLPLFIIWLSVSASCASVLPVPEGSRTEMPTQENASDGIPYPVPTLQDRLDYLEGKIVRLSNEVEMLNGKVKALEHTKIHPSGRTYVQKLDDRKLKEHYLNTEGGSASAHTVETAQNLYNQALKHYQNGRFSAAAALLKGADGGDGGSIAQRSMYLLLQSRARMGNCESVIEIGGRYANRFKDSPTAPEVIFKIGECQYRLQQKDIARATWRSLIQTYPGSPAAKRAAAAVRKR

SEQ ID NO: 3829 - protein, 305 aa, Neisseria
LPQTRPSRRHHRHRQYFAERKGDARSGFRCAAQRRHPQRFQSKPAERPAHRPHHPARRRRLDPASEKIMKIKLPLFIIWLSVSASCASVSPVPAGSQTEMSTRENASDGIPYPVPTLQDRLDYLEGKIVRLSNEVETLNGKVKALEHAKTHSSGRAYVQKLDDRKLKEHYLNTEGGSASAHTVETAQNLYNQALKHYKSGKFSAAASLLKGADGGDGGSIAQRSMYLLLQSRARMGNCESVIEIGGRYANRFKDSPTAPEAMFKIGECQYRLQQKDIARATWRSLIQTYPGSPAAKRAAAAVRKR

SEQ ID NO: 3830 - protein, 305 aa, Neisseria
LPQACPARRHHCHRQYFVERKGDARSGFRCAAQRRHPQRFSKPAERYADCPHHPARRRRFDPASEKIMKTKLPLFIIWLSVSAACSSPVSRNIQDMRLEPQAEAGSSDAIPYPVPTLQDRLDYLEGTLVRLSNEVETLNGKVKALEHAKTHPSSRAYVQKLDDRKLKEHYLNTEGGSASAHTVETAQNLYNQALKHYKSGRFSAAASLLKGADGGDGGSIAQRSMYLLLQSRARMGNCESVIEIGGRYANRFKDSPTAPEAMFKIGECQYRLQQKDIARATWRSLIQTYPGSPAAKRAAAAVRKR

SEQ ID NO: 3831 - protein, 120 aa, Neisseria
LGCRQAASHHFCQGNKLFGGIFHFVCRFLSRVGSFVQSIFSCFSYSFFGFSYSFLGTCLCISRSIFDLVFRFFDGRSGRLGGRSRSVFNIGLNGLNRFLNLLFGFLRTSCQGSRHHCGNQ

SEQ ID NO: 3832 - protein, 120 aa, Neisseria; identical to SEQ ID NO: 3831

SEQ ID NO: 3833 - protein, 300 aa, Neisseria
MSSLMTLFSVLVPMFAGFFIRVPKPYLPASDKVLSVLVYAVLLLIGVSLSRVEDLGSRLGDMALTVLWLFVCTVGANLLALAVLGKLSPWRIGGKGKGVSVGVSGSVRQLGCVLLGFVSGKLMCDIWMPSENAGMYCLMLLVFLIGVQLKSSGVSLRQVLLNRRGIRLSVWFILSSLSGGLLFAASADGVSWTKGLAMASGFGWYSLSGLVMTEAYGAVWGSIMLLNDLARELFALAFIPLLMKRFPDAAVGVGGATSMDFTLPVIQGAGGLEVVPVAVSFGVVVNIAAPFLMVVFSTLG

SEQ ID NO: 3834 - protein, 300 aa, Neisseria; identical to SEQ ID NO: 2098

SEQ ID NO: 3835 - protein, 300 aa, Neisseria
  VARIANT (1)...(300): Xaa = Any Amino Acid
MDSLMTLLSVLIPMFAGFFIRVPKPYLPALDKVLSVLVYAVLLLIGVSLSRVEDLGSRLDDMALTVLWLFVCTVGANLLALAVLGKLFPWRIKGKGKGVSVGVSGSVGQLGCVLLGFASGKLMRDIWMPSENAGMYCLMLLVLXIGVQLKSSGVSLRQVLVNRRGIRLSVWFMLSSLSGGLLFAASADGVSWVKGLAMASGFGWYSLSGLVMTEAYGAVWGSIALLNDLARELFALAFIPLLMKRFPDAAVGVGGATSMDFTLPVIRGAGGLEAVPVAVSFGVVVNIAAPFLMVVFSALG

SEQ ID NO: 3836 - protein, 128 aa, Neisseria
MSWHIFQVAGIPTASMAQSTPSSPTMAKTCLETSPEAGLMVWVAPNSFAGFKRFSSISHTIMAAGLYSWAVNKADIPTGPAPAMNTVSPGFTSPYCTPISWAVGKASLNSRAISSLTLSCGGTRLLSA

SEQ ID NO: 3837 - protein, 128 aa, Neisseria
MSWHIFHVAGIPTASMAQSTPSSPTMAKTCLDTSPEAGLMVWVAPNSFASFKRFSSISQTMMAAGLYSWAVNRADIPTGPAPAMNTVSPGLTSPYCTPISWAVGKASLNNRAISSLTLSGSGTRLLSA

SEQ ID NO: 3838 - protein, 128 aa, Neisseria
MSWHIFQVAGIPTASIAQSTPSSPTIAATCLLTSPEAGLMVWVAPNSFASFKRFSSISQTMMAAGLYSWAVGKADIPTGAAPAMNTVSPGLTSPYCTPISCAVGKASLNNRATSSLTLSGSGTRLLSA

SEQ ID NO: 3839 - protein, 124 aa, Neisseria
MPCSKASWTSPGVATPGIRGMPLLRPALARDSCKPGLMAKTAPASSTALSCSGLVTVPAPMMALGISLAIRRMASSPTGVRKVISRVGMPPSTRARDKSTAVLKSSIAITGTTAPAVRISRGVS

SEQ ID NO: 3840 - protein, 143 aa, Neisseria
MPCSKASWISPGVATPGIRGMPLLWPALARDSCSPGLMAKTAPASSTALSCSGLVTVPAPTMALGTSLAIRRMASRPTGVRRVISRVGMPPSTRAWDKSMAVLKSSIAITGTTAPAVKISRGVSLDISVLRVEWGILLRWDRL

SEQ ID NO: 3841 - protein, 143 aa, Neisseria; identical to SEQ ID NO: 3840

SEQ ID NO: 3842 - protein, 288 aa, Neisseria
MKAKILTSVALLACSGSLFAQTLATVNGQKIDSSVIDAQVAAFRAENSRAEDTPQLRQSLLENEVVNTVVAQEVKRLKLDRSAEFKDALAKLRAEAKKSGDDKKPSFKTVWQAVKYGLNGEAYALHIAKTQPVSEQEVKAVYDNISGFYKGTQEVQLGEILTDKEENAKKAVADLKAKKGFDAVLKQYSLNDRTKRTGAPDGYVPLKDLEQGVPPLYQAIKDLKKGEFTATPLKNGDFYGVYYVNDSREVKVPSFDEMKGQIAGNLQAERIDRAVCALLGKANIKPAK

SEQ ID NO: 3843 - protein, 288 aa, Neisseria; identical to SEQ ID NO: 927

SEQ ID NO: 3844 - protein, 288 aa, Neisseria; identical to SEQ ID NO: 927

SEQ ID NO: 3845 - protein, 823 aa, Neisseria
MKKTCFHCGLDVPENLHLTVRYENEDRETCCAGCQAVAQSIIDAGLGSYYKQRTADAQKTELPPQEILDQIRLYDLPEVQSDFVETHGGTREAVLMLGGITCAACVWLIEQQLLRTDGIVRIDLNYSTHRCRVVWDDGKIRLSDILLKIRQIGYTAAPYDAQKIEAANQKERKQYIVRLAVAGLGMMQTMMFALPTYLYGGDIEPDFLQILHWGGFLMVLPVVFYCAVPFYQGALRDLKNRRVGMDTPITVAIIMTFIAGVYSLATNAGQGMYFESIAMLLFFLLGGRFMEHIARRKAGDAAERLVKLIPAFCHHMPDYPDTQETCEAAVVKLKAGDIVLVKPGETIPVDGTVLEGSSAVNESMLTGESLPVAKMPSEKVTAGTLNTQSPLIIRTDRTGGGTRLSHIVRLLDRALAQKPRTAELAEQYASSFIFGELLLAVPVFIGWTLYADAHTALWITVALLVITCPCALSLATPTALAASTGTLAREGILIGGKQAIETLAQTTDIIFDKTGTLTQGKPAVRRISLLRGTDEAFVLAVAQALEQQSEHPLARAILNCRISDGSVPDIAIKQRLNRIGEGVGAQLTVNGETQVWALGRASYVAEISGKEPQTEGGGSAVYLGSQSGFQAVFYLQDPLKDSAAEAVRQLAGKNLTLHILSGDRETAVAETARALGVAHYRAQAMPEDKLEYVKALQKEGKKVLMIGDGINDAPVLAQADVSAAAAGGTDIARDGADIVLLNEDLRTVAHLLDQARRTRHIIRQNLIWAGAYNIIAVPLAVLGYVQPWIAALGMSFSSLAVLGNALRLHKRGKMQSEKMPSEQ

SEQ ID NO: 3846 - protein, 238 aa, Neisseria
VFNNFLASLPFMTETRADMLISAFWPMVKAGFTVSLPLAIASFVIGMIIAVAVALVRIMPSGGIFQKCLLKLVEFYISVVRGTPLLVQLVIVFYGLPSVGIYINPIPAAIIGFSLNVGAYASETIRAAILSVPKGQWEAGFSIGMTYMQTFRRIVAPQAFRVAVPPLSNEFIGLFKNTSLAAVVTVTELFRVAQETANRTYDFLPVYIEAALVYWCFCKVLFLIQARLEKRFDRYVAK

SEQ ID NO: 3847 - protein, 238 aa, Neisseria
VFNNFLASLPFMTETRADMIVSAFLPMVKAGFAVSLPLAAASFVIGMMIAVAVALVRIMPAGGIVRKILLKLVEFYISVIRGTPLLVQLVIVFYGLPSVGIYIDPIPAAIIGFSLNVGAYASETIRAAILSVPKGQWEAGFSIGMTYMQTFRRIVAPQAFRVAVPPLSNEFIGLFKNTSLAAVVTVTELFRVAQETANRTYDFLPVYIEAALVYWCFCKVLFLIQARLEKRFDRYVAK

SEQ ID NO: 3848 - protein, 238 aa, Neisseria; identical to SEQ ID NO: 3847

SEQ ID NO: 3849 - protein, 375 aa, Neisseria; identical to SEQ ID NO: 319

SEQ ID NO: 3850 - protein, 375 aa, Neisseria; identical to SEQ ID NO: 316

SEQ ID NO: 3851 - protein, 375 aa, Neisseria; identical to SEQ ID NO: 317

SEQ ID NO: 3852 - protein, 559 aa, Neisseria; identical to SEQ ID NO: 1075

SEQ ID NO: 3853 - protein, 487 aa, Neisseria
  VARIANT (1)...(487): Xaa = Any Amino Acid
XKETAFKTGMCLGSNNLSRLQKAAQQILIVRGYLTSQAIIQPQNMDSGILKLRVSAGEIGDIRYEEKRDXKSAEGSISAFNNKXPLYRNKILNLRDVEQGLENLRRLPSVKTDIQIIPSEEEGKSDLQIKWQQNKPIRFSIGIDDAGGKTTGKYQGNVALSXDNPLGLSDXFYVSYGRGLVHKTDLTXATGTETESGSRSYSVHYSVXVKKWLFSFNHNGHRYHEATEGYSVNYDYNGKQYQSSLAAERMLWXXXFXXTSVXMKLWTRQTYKYIDDAEIEVQRRRSAGWEAELRHRAYLXRWQLDGKLSYKRGTGMRQSMPAPEENGGGTIPXXSRMKIITAGLDAAAPXMLGKQQFFYATAIQAQWNKTPLVAQDKLSIGSRYTVRGFDGEQSLFGERGFYWQNTLTWYFHPNHQFYLGADYGRVSGESAQYVSGKQLMGAVVGFRGGHKVGGMFAYDLFAGKPLHKPKGFQTTNTVYGFNLNYSF

SEQ ID NO: 3854 - protein, 253 aa, Neisseria
MPFKPSKRISLLLVLALGACSTSYRPSRAEKANQVSNIKTQLAMEYMRGQDYRQATASIEDALKSNPKNELAWLVRAEIYQYLKVNDKAQESFRQALSIKPDSAEINNNYGWFLCGRLNRPAESMAYFDKALADPTYPTPYIANLNKGICSAKQGQFGLAEAYLKRSLAAQPQFPPAFKELARTKMLAGQLGDADYYFKKYQSRVEVLQADDLLLGWKIAKALGNVQAAYEYEAQLQANFPYSEELQTVLTGQ

SEQ ID NO: 3855 - protein, 253 aa, Neisseria; identical to SEQ ID NO: 1857

SEQ ID NO: 3856 - protein, 253 aa, Neisseria
  VARIANT (1)...(253): Xaa = Any Amino Acid
MPFKPSKRISLLLVLALGACSTSYRPSRAEKANQVSNIKTQLAMEYMRGQDYRQXTASIEDALKSDPKNELAWLVRAEIYQYLKVNDKAQESFRQXLSIKPDSAEINNNYXWFLCGRLNRPAESMAYFDKALADPTYPXPYIANLNKGICSAKQGQFGLAEAYLKRSLAAQPQFPPAFKELARTKMLAGQLGDADYYFKKYQSRVEVLQADDLLLGWKIAKALGNAQAAYEYEAQLQANFPYSEELQTVLIGQ

SEQ ID NO: 3857 - protein, 459 aa, Neisseria
MFAFKSLLDMPRGEALAVVVALIAAMGYTIISLEWLPHMSIIAAIVVLILYGLARGLKYNDMQAGMIGALNQGMGAVYLFFFIGLMVSALMMSGAIPTLMYYGFGLISPTYFYFSAFALCSVIGVSIGSSLTACATVGVAFMGMAAAFQADMAMTAGAIVSGVFFGDKMSPLSDTTGISASIVGIDLFEHIKNMMYTTIPAWLISAALMLWLLPSVAAQDLNSVESFRSQLEATGLVHGYSLIPFALLVVLALMRVNAVVAMLFTVIAAVAVTYLHSTPDLRQLGAWFYGGYKLEGEAFKDIAKLISRGGLESMFFTQTIVILGMSLGGLLFALGVIPSLLEAVRTFLTNAGRATFSVAMTSVGVNFLIGEQYLSILLSGETFKPVYDKLGLHSCNLSRTLEDAGTVINPLVPWSVCGVFISHALGVPVWEYLPYAFFCYLSLALTLLFGWTGLTLSKK

SEQ ID NO: 3858 - protein, 459 aa, Neisseria; identical to SEQ ID NO: 1114

SEQ ID NO: 3859 - protein, 459 aa, Neisseria
  VARIANT (1)...(459): Xaa = Any Amino Acid
MFAFXSLLDMPRGEALAVVVALIAAMGYTIIXLEWLPHMSIIAAIVVLILYGLARGLKYNDMQQGMIGALNQGMGAIYLFFFIGLMVSALMMSGAIPTLMYYGFGLISPTYFYFSAFALCSVIGVSIGSSLTTCATVGVAXMGXXXAFXAXMXXXXXXIVXXAXXGXKMSPLSDTXGXSASIVGIDLFEHIKNMMYTTIPAWLISXXLMLXLLPSVAAQDLNSVESFRSQLEATGLVHCYSLIPFALLVVLALMRVNAVVAMLFTVIAAVAVTYLHSTPDLRQLGAWFYGGYKLEGEAXXDIAKLISRGGLESMFFTQTIVILGMSLGGLLFALGAIPSLLDAVRSFLTNAGRXTFSVAMTSVGVNFLIGEQYLSILLSGETFKPVYDKLGLHSRNLSRTLEDAGTVINPLVPWSVCGVFIXHALGVPVWEYLPYAFFCYLSLALTLLFGWTGLTLSKK

SEQ ID NO: 3860 - protein, 125 aa, Neisseria; identical to SEQ ID NO: 713

SEQ ID NO: 3861 - protein, 126 aa, Neisseria
METHEKIRLMRELNKWSQEDMAEKLAMSAGGYAKIERGETQLNIPRLEQLAQIFKIDMWDLLKSGGGGMVLQINDVDTNSGEFAIYTAQDASGKAGFVKMELKHCKEMLEHKDKEIELLRKLTETV

SEQ ID NO: 3862 - protein, 431 aa, Neisseria; identical to SEQ ID NO: 1658

SEQ ID NO: 3863 - protein, 431 aa, Neisseria
MPAPDLGFALSLPPKKAIEWLESKKVTAESYRNLTASEIAKVYTIARMTDLDMLNDIKTSMVESAKSGQSFDDWRKGILNLLSNKGWLHPNGHNGKDIIDPATGEVFGSPRRLETIYRTNMQTAYNAGQYQGYMANIDARPYWMYDAVGDSRTRPAHSAIDGLVYRYDDPFWATFYPPNGYNCRCSVIALSERDVERQGRIVGQSTSDNLVETHKIYNKKGDTYLTLAYKAPDGSLYTTDRGFDYNAGRMNYRPDLDKYDRALAHQFAKAEMGGADFKTSFKQLEKEFYEVKQRLDIDGKPDKEQKIKIRNALSRQLKFAAGVLSKETQELAGMTRATVWLSDDTLVKQVDSREGQNFDDSYYAFLPDMLQNPEHVIRDNRELIFTARYKGSALWAVLKYIKEVDEIYLQSYRISNDKEIAKFMAKKKVLK

SEQ ID NO: 3864 - protein, 470 aa, Neisseria
MMPHIDFDTIPGSIRVPGQYIEFNTRNAVQGLPQNPQKVLMVAPMLTAGIQPALEPVQLFSDAEAADLFGQGSLAHLMVRQAFANNPYLDLTVIGIADHSAGVQATATVTLSGTATAPGVVEITIGGKQVSTAVNTGETAATVADRLKTAITAADVTVTASGSGAAVTLTAKHKGEIGNESGLTVSTGNTGLTYQANAFTGGAKNADIATALSKVAGKHYHIICSPFSDDANAKALSNHITNVSNAIEQRGCIGVLGMSAALSTATTATGEINDGRMTCAWYKGAVEPNGIIAAGYAAVLAFEEDPAKPLNTLEIKGLAVTPDAQWPLFAECNNALYNGLTPLTVVNNRVQIMRAVSTYTKSANNTDDPALLDITTIRTLDYVRRSVKERIALRFPRDKLSDRLLPKVKSEILDVLIKLDQAEIIENAEANKGKLVVARAQNDPNRVNAIIPADVVNGLHVFAGRIDLIL

SEQ ID NO: 3865 - protein, 381 aa, Neisseria; identical to SEQ ID NO: 1671

SEQ ID NO: 3866 - protein, 381 aa, Neisseria
MQNNSYGYAVSVRVGGKEHRHWERYDIDSDFLIPADSFDFVIGRLGPEAAIPDLSGESCEVVIDGQIVMTGIIGSQRHGKSKGGRELSLSGRDLAGFLVDCSAPQLNVKGMTVLDAAKKLAAPWPQIKAVVLKVENNPALDKIDIEPGETVWQALTHIANSVGLHPWLEPDGTLVVGGVDYSSPPVATLCWSRTDSRRNIERMDIEWDTDNRFSEVTFLAQSHGRSGDSAKHDLKWVYKDPTMTLHRPKTVVVSDADNLAALQKQAKKQLADWRLEGFTLTITVGGHKTRDGVLWQPGQRVHVIDDEHGIDAVFFLMGRRFMLSRMDGTQTELRLKEDGIWTPDAYPKKAEAARKRKGKRKGVSHKGKKGGKKQAETAVFE

SEQ ID NO: 3867 - protein, 186 aa, Neisseria; identical to SEQ ID NO: 1674

SEQ ID NO: 3868 - protein, 186 aa, Neisseria
MSYQDILRGLLPPVSYARNAPRVRAQAEIDGAALDAVAESAQSVADAVDPSSAGQMLADWERVLGLDGTGKNRQRRVLAVMAKLNETGGLSIPYFVRLAEAAGYQIQIDEPQPFRAGVNRAGDRLAPQEIMWVWHVNVRGGNNRITRFRAGISAAGDRLTDYSDAVIESLFNRLKPAHTAIRFTYR

SEQ ID NO: 3869 - protein, 138 aa, Neisseria
MIDVKIDNIFVVLNQIERLGNGIENRYLLMRRLSETMHTAVKLNFRYAGRPKWVGLKYRDGKPLSDSGRLKDSFSTLSDNDTALVGTNIVYAAIHNFGGMAGRNRKVRIPQREFLTLTDDDKQALMDDVQDYFSGLIP

SEQ ID NO: 3870 - protein, 138 aa, Neisseria
MIDVKIDNIFVVLNQIERLGNGIENRYLLMRRLSETMHTAVKLNFRYAGRPKWLGLKYRDGKPLSDSGRLKDSFSTLSDNDTALVGTNIVYAAIHNFGGMAGRNRKVRIPQREFLTLTDDDKQALMDDVQDYFSGLIP

SEQ ID NO: 3871 - protein, 112 aa, Neisseria
MNKNIAAALAGALSLSLAAGAVAAHKPASNATGVQKSAQGSCGASKSAEGSCGASKSAEGSCGAAASKAGEGKCGEGKCGATVKKAHKHTKASKAKAKSAEGKCGEGKCGSK

SEQ ID NO: 3872 - protein, 102 aa, Neisseria; identical to SEQ ID NO: 2650

SEQ ID NO: 3873 - protein, 102 aa, Neisseria; identical to SEQ ID NO: 2650

SEQ ID NO: 3874 - protein, 473 aa, Neisseria; identical to SEQ ID NO: 190

SEQ ID NO: 3875 - protein, 473 aa, Neisseria; identical to SEQ ID NO: 188

SEQ ID NO: 3876 - protein, 473 aa, Neisseria; identical to SEQ ID NO: 189

SEQ ID NO: 3877 - protein, 380 aa, Neisseria
SDGLYVPRNFIHRPQSWFKWDKDNGLLLRTRENPEGEALWPLGWVVHTQKSRSVQQARNGLFRTLSWLYMFKHYAVHDFAEFLELYGMPIRIGKYGAGATKEEKNTLLRAVAEIGHNAAGIMPEGMEIELHNAANGTTATSNPFLQMADWCEKSAARLILGQTLTSGADGKSSTNALGNIHNEVRRDLLVSDAKQVAQTITSQIIGPFLQINYPHADPNRVPKFEFDTREPKDIAVFADAIPKLVDVGVQIPESWVRDKLVIPDVQEGEAVLVRQVPDNPVNRTALAALSAHTVPSKATGRHQEILDGALDDALVEPDFNSQLNPMVRQAVAALNACNSYEEADAALNALYPNLDNAKLRTYMQQALFISDILGQDHARA

SEQ ID NO: 3878 - protein, 526 aa, Neisseria
MEPIMAKKNNKTKIQKPEAALQTDVAQITATGRVIAEHPSNFITPQKMRALFEDAESGDIRAQHELFADIEERDSDIAANMGTRKRALLTLNWRVAPPRNATPEEEKLSDQAYEMMDSLPTLEDLIMDLMDAVGHGFSALEVEWVFSDGLYLPRNFIHRPQSWFKWDKDNGLLLRTRENPEGEALWPLGWVVHTQKSRSVQQARNGLFRTLSWLYMFKHYAVHDFAEFLELYGMPIRIGKYGAGATKEEKNTLLRAVAEIGHNAAGIMPEGMEIELHNAANGMTSAGNPFLQMADWCEKSAARLILGQTLTSGADGKSSTNALGNIHNEIRRDLLVSDAKQVAQTITSQIIGPFLQINYPHADPNRVPKFEFDTREPKDIAVFADAIPKLVDVGVQIPESWVRDKLVIPDVQEGEAVLVRQVPDNPVNRTALAALSAHTVPSKATGRHQEILDGALDDALVEPDFNSQLNPMVRQAVAALNACNSYEEADAALNALYPNLDNAKLRTYMQQALFISDILGQDHARA

SEQ ID NO: 3879 - protein, 526 aa, Neisseria
MEPIMAKKNNKTKIQKPEAALQTDVAQITATGRVIAEHPSNFITPQKMRALFEDAESGDIRAQHELFADIEERDSDIAANMGTRKRALLTLNWRVAPPRNATPEEEKLSDQAYEMMDSLPTLEDLIMDLMDAVGHGFSALEVEWVFSDGLYLPRNFIHRPQSWFKWDKDNGLLLRTRENPEGEALWPLGWVVHTQKSRSVQQARNGLFRTLSWLYMFKHYAVHDFAEFLELYGMPIRIGKYGAGATKEEKNTLLRAVAEIGHNAAGIMPEGMEIELHNAANGTTATSNPFLQMADWCEKSAARLILGQTLTSGADGKSSTNALGNIHNEVRRDLLVSDAKQVAQTITSQIIGPFLQINYPHADPNRVPKFEFDTREPKDIAVFADAIPKLVDVGVQIPESWVRDKLVIPDVQEGEAVLVRQVPDNPVNRTALAALSAHTVPSKATGRHQEILDGALDDALVEPDFNSQLNPMVRQAVAALNACNSYEEADAALNALYPNLDNAKLRTYMQQALFISDILGQDHARA

SEQ ID NO: 3880 - protein, 526 aa, Neisseria; identical to SEQ ID NO: 3878

SEQ ID NO: 3881 - protein, 723 aa, Neisseria
MANGNMKLSLVLTARDDGARRLLADTQRQLDRTAKSRAQLERQSHTYALTGIRSEKQIQREIMLTQAAFNRLARSGKASQNDLARAAVATRNRIRELNAELKQGTGFADKMGKIGRFGAAAVAGGAAAYTVLKPAMDNRKQLDENINRVSRQAFIEDNSKSAAWIATEGAQQIKDLALELVEKNGGTHDKALDLISGMMTTGLNFAQTKNEAQAAYAFALASEGSGEDTAKLIKTLKDGGMSGKDLQLGLEHVLQSGLDGTFEVRDMVRELPSLLSAAQQAGMNGVGGLDYLLSLLQSAANKSGSPAEAATNVQNLLSKTLSPDTIGRLKKMANPNDPKKGVDWIGSVVQGKQNGENAVQVLSRLADAMLVKDKQYQDYKKRAAAGDKTAAEQANMLKGALLAQLLPDLQAKQGLLAATDMTQIREYMASLAGVTLDNGKIAKNNEARMLSAAAQQEQQESLAMLRESLTGTLVDMETSFKKLAAEYPNATLALQALTTAATAASAAMLLTAGGGKGAGFLKDVGSKALGWGKASAGGVAAGATAAGGKLLSWGKSAGSGLMNNPALVKRAGLLGMLLYSESLGDGTLPKGLRGTKTTPEMINRLKNNGIRFEPAPKREQARGGVPQYLAAPSAQPTDKMLSPLFSTQTAAYQAAIQQQTAAYQAALAQDTAAVTTGLAQVQSAMASASQTINTNVSLNIDGRVIANEVSRYQVAMFGRGAGQ

SEQ ID NO: 3882 - protein, 443 aa, Neisseria; identical to SEQ ID NO: 1670

SEQ ID NO: 3883 - protein, 169 aa, Neisseria
GLQNRLNRLTAKQVQPVAQAVRLLSTSSLLSVATALIEAHGEEMTAPDLIEVNRAMRRRMQAEIAALRAVQTAAAESGGLTANAVYTEAYQTAESLRAAAGRLNALVAAVINQKPPLIVRQAPIDGTIHQIAHEFYGDIARAAELVRLNPHIHHPAFIKRGTLVNSYAK

SEQ ID NO: 3884 - protein, 353 aa, Neisseria; identical to SEQ ID NO: 1659

SEQ ID NO: 3885 - protein, 352 aa, Neisseria
MSKNAQKTLLAVCSFEVQPKDGRIQLLPYGEFRAVDGRPTDVPAWYLTEENGHDVALLANSSRNQLVVDYEHTLYKEKNGQPAPAAGWMRWLEFTPKGMFAEVEWTDKAAAAIAAKEYRYISAVFSYDTKGYVSKIFHAALTNFPALDGMDEVLAAASAQILKPETEQNPMKELLQQLFGLPDAGEEELKAALSALVEAKPKDVALSADVFAQLAEKDSRIAALTAQTAKPDLTKYAPISVVQELQSKVAALTAKQEADKGNELITAALTSGKLLPAQKEWAEGVLKQPGGLAFLTGFIENAQPVAALAGSQTGGKAPDERVAALTAEEAAAAKMLGMSGEEFVKIKESEGK

SEQ ID NO: 3886 - protein, 351 aa, Neisseria
VFETPTFEQIRERILRDTKSLWPDADISPDSDHYVHASRLASCAEGQYAHQSWIVRQIFPDTADREYLERHASMRGLSRRNPTTASGTLTVSGIAQSMLSDDLQVRIGQRFYRTTARAVIGSGGTAEIPAIADEPGAAANVGDGEAQLMAAPAGVATECRLTVQGGTDRESDASLLARLLEIIRRPPAGGNRYDYKNWALSVDGVTSAYVYPLRRGLGTVDIAITSADGVSSEETVRRVQAYIDEMRPVTAKNALVLKPTVTAVPVTVQVKLDGIDLDEAKRRIRTALKEYFDTLIPGDGLTVSQIEAAISNVDGVIDRRLTAPTANRAADTVNRIEWFKAGAINVTEMPS

SEQ ID NO: 3887 - protein, 351 aa, Neisseria
VFETPTFEQIRERILRDTKSLWPDADISPDSDHYVHASRLASCAEGQYAHQSWIVRQIFPDTADREYLERHASMRGLRRRNPTTASGTLTVSGIAQSMLSDGLQVRIGQRFYRTTARAVIGSGGTAEIPAIADEPGAAANVRDGEAQLMAAPAGVSTECRLTVQGGTDRESDASLLARLLEIIRRPPAGGNRYDYKNWALSVDGVTSAYVYPLRRGLGTVDIAITSADGVPSEETVRRVQAYIDEMRPVTAKNALVLKPTVTAVPVTVQVKLDGIDLDEAKRRIRTALKEYFDTLIPGDGLTVSQIEAAISNVDGVIDLRLTAPTANRAADTVNRIEWFKAGAINVTEMPS

SEQ ID NO: 3888 - protein, 302 aa, Neisseria
MRPKPRFRRSVIACSISVITPEHLIFTVYKHNTVFARGHFFAAIIHAQLHFAFGHSTQQVEHVDFVAVADFVGNQHALSRRQTVAGNVAAKAHQDGRQILKRSSEPPQIRVDFGSGVHQRGLCDLAVNQPLVVAVGELQDFQLTETRNHILNRRVCHYSTALRCSIGSAQIAFHTASPTSARFTSRQPPSNSRPPRQNSLPSAPVLTSITSRLSAKASAARCVCCTLSSASSADSAFLSSSAFSKAVVSISTSFRAAASSACTASNSALMSSNDGAAVSAVSGLLLVFAMMTPCFRRRRIRI

SEQ ID NO: 3889 - protein, 222 aa, Neisseria; identical to SEQ ID NO: 1672

SEQ ID NO: 3890 - protein, 222 aa, Neisseria; identical to SEQ ID NO: 1672

SEQ ID NO: 3891 - protein, 197 aa, Neisseria; identical to SEQ ID NO: 1663

SEQ ID NO: 3892 - protein, 201 aa, Neisseria; identical to SEQ ID NO: 1679

SEQ ID NO: 3893 - protein, 201 aa, Neisseria
MTIYFKNGFYDDTLGSIPEGAVAVRAEEYAALLAGQAQGGQIAADSDGRPVLTPPRPSEYHEWDGKKWEIGEAAAAARFAEQKTATAFRLAAKADELKNSLLAGYPQVEIDSFYRQEKEALARQADNNAPTPMLAQIAAARGVELDVLIEKVVEKSARLAVAAGAIIGKRQQLEDKLNTIETAPGLDALEKEIEEWTLNIG

SEQ ID NO: 3894 - protein, 134 aa, Neisseria; identical to SEQ ID NO: 1558

SEQ ID NO: 3895 - protein, 139 aa, Neisseria
MNLVKLLANNWQPIAIIALVGTGLAVSHHQGYKSAFAKQQAVIEKMKRDKAQALLLSAQNYARELEQARAEAKKYEVKAHAVGMALAKKQAEVSRLKTENKKEIENVLTQDRKNAGGGCIDGFGHHGLQLYKRALGYGN

SEQ ID NO: 3896 - protein, 377 aa, Neisseria
MFKKFKPVLLSFFALVFAFWLGTGIAYEINPRWFLSDTATEVPENPNAFVAKLARLFRNADRAVVIVKESMRTEESLAGAVDDGPLQSEKDYLALAIRLSRLKEKAKWFHVTEQEHGEEVWLDYYIGEGGLVAVSLSQRSPEAFVNAEYLYRNDRPFSVNVYGGTAHGENYETTGEYRVVWQPDGSVFDAAGRGKIGEDVYEHCLGCYQMAQVYLAKYRDVANDEQKVWDFREESNRIASDSRDYVFYQNMRELMPRGMKANSLVVGYDADGLPQKVYWSFDNGKKRQSFEYYLKNGNLFIAQSSTVALKADGVTADMQTYHAQQTWYLDGGRIIREEKQGDRLPDFPLNLEDLEKEVSRYAEAAARRSGGRRGLSH

SEQ ID NO: 3897 - protein, 377 aa, Neisseria; identical to SEQ ID NO: 948

SEQ ID NO: 3898 - protein, 374 aa, Neisseria
MFKKFKPVLLSFFALVFAFWLGTGIAYEINPRWFLSDTATENPNAFVAKLARLFRNADRAVVIVKESMRTEESLAGAVDDGPLQSEKDYLALAVRLSRLKEKAKWFHVTEQEHGEEVWLDYYIGEGGLVAVSLSQRSPEAFVNAEYLYRNDRPFSVNVYGGTVHGENYETTGEYRVVWQPDGSVFDASGRGKIGEDVYEHCLGCYQMAQVYLAKYRDVANDEQKVWDFREESNRIASDSRDSVFYQNMRELMPRGMKANSLVVGYDADGLPQKVYWSFDNGKKRQSFEYYLKNGNLFIAQSSTVALKADGVTADMQTYHAQQTWYLDGGRIVREEKQGDRLPDFPLNLEDLEKEVSRYAEAAARRSGGRRDLSH

SEQ ID NO: 3899 - protein, 467 aa, Neisseria
MNTTLKTTLTSVAAAFALSACTMIPQYEQPKVEVAETFQNDTSVSSIRAVDLGWHDYFADPRLQKLIDIALERNTSLRTAVLNSEIYRKQYMIERNNLLPTLAANANGSRQGSLSGGNVSSSYNVGLGAASYELDLFGRVRSNSEAALQGYFASVANRDAAHLILIATVAKAYFNERYAEKAMSLAQRVLKTREETYKLSELRYKAGVISAVALRQQEALIESAKADYAHAARSREQARNALATLINRPIPEDLPAGLPLDKQFFVEKLPAGLSSEVLLDRPDIRAAEHALKQANANIGAARAAFFPSIRLTGSVGTGSVELGGLFKSGTGVWAFAPSITLPIFTWGTNKANLDVAKLRQQAQIVAYESAVQSAFQDVANALAAREQLDKAYDALSKQSRASKEALRLVGLRYKHGVSGALDLLDAERISYSAEGAALSAQLTRAENLADLYKALDGGLKRDTQTGK

SEQ ID NO: 3900 - protein, 467 aa, Neisseria; identical to SEQ ID NO: 2245

SEQ ID NO: 3901 - protein, 467 aa, Neisseria
MDTTLKTTLTSVAAAFALSACTMIPQYEQPKVEVAETFKNDTADSGIRAVDLGWHDYFADPRLQKLIDIALERNTSLRTAVLNSEIYRKQYMIERNNLLPTLAANANDSRQGSLSGGNVSSSYKVGLGAASYELDLFGRVRSSSEAALQGYFASTANRDAAHLSLIATVAKAYFNERYAEEAMSLAQRVLKTREETYKLSELRYKAGVISAVALRQQEALIESAKADYAHAARSREQARNALATLINQPIPDDLPAGLPLDKQFFVEKLPAGLSSEVLLDRPDIRAAEHALKQANANIGAARAAFFPSIRLTGSVDTHSAELGGLFKSGTGVWLFAPSITLPIFTWGTNKANLDVAKLRQQAQIVAYEAAVQSAFQDVANALTAREQLDKAYDALSKQSRASKEALRLVGLRYKHGVSGALDLLDAERSSYSAEGAALSAQLTRAENLADLYKALGGGLKRDTQTDK

SEQ ID NO: 3902 - protein, 576 aa, Neisseria
VKPLRRLTNLLAACAVAAVALIQPALAADLAQDPFITDNTQRQHYEPGGKYHLFGDPRGSVSDRTGKINVIQDYTHQMGNLLIQQAAIQGNLGYTVRFSGHGHEEHAPFDNHAADSASEEKGNVDDGFTVYRLNWEGHEHHPADAYDGPKGGNYPKPTGARDEYTYHVNGTARSIKLNPTDTRSIRQRIFDNYNNLGSNFSDRADEANRKMFEHNAKLDRWGNSMEFVNGVAAGALNPFISAGEALGIGDILYGTRYAIDKAAMRNIAPLPAEGKFAAIGGLGSAAGFEKNTREAVDRWIQENPNAAETVEALVNVLPFAKVKNLTKAAKPGKAAVSGDFSKSYTCSFHGSTLVKTADGYKAIAHIQAGDRVLSKDEASGETGYKPVTARYGNPYQETVYIEVSDGIGNSQTLISNRIHPFYSDGKWIKAEDLKAGSRLLSESGKTQTVRNIVVKPKPLKAYNLTVADWHTYFVKGNQAETEGVWVHNDCPPKPKPTNHAQQRKEEAKNDSHRSVGDSNRVVREGKQYLDSDTGNHVYVKGDKVVILTPDGRQVTQFKNSKANTSKRVKNGKWTPK

SEQ ID NO: 3903 - protein, 467 aa, Neisseria; identical to SEQ ID NO: 557

SEQ ID NO: 3904 - protein, 498 aa, Neisseria
VKPLRRLIKLLAACAVAAAALIQPALAADLAQDPFITDNAQRQHYEPGGKYHLFGDPRGSVSDRTGQINVIQDYTHRMGNLLIQQANINGTIGYHTRFSGHGYEEHAPFDNHAADSASEEKGNVDEGFTVYRLNWEGHEHHPADAYDGPKGGNYPKPTGARDEYTYHVNGTARSIKLNPTDTRSIRQRISDNYSNLGSNFSDRADEANRKMFEHNAKLDRWGNSMEFINGVAAGALNPFISAGEALGIGDILYGTRYAIDKAAMRNIAPLPAEGKFAVIGGLGSVAGFEKNTREAVDRWIQENPNAAETVEALVNVLPFAKVKNLTKAAKPGKAAVSGDFSAAYNTRTTRKVTTETEGLNRIRQNQKNSNIHEKNYGRDNPNHINVLSGNSIQHILYGDEAGGGHLFPGKPGKTTFPQHWSASKITHEISDIVTSPKTQWYAQTGTGGKYIAKGRPARWVSYETRDGIRIRTVYEPATGKVVTAFPDRTSNPKYNPVK

SEQ ID NO: 3905 - protein, 84 aa, Neisseria
DFRAFSCENGLSVRVRNLDGGKIALRLDGRRAVLSSDVAASGERYTAEHGLFGNGTEWHQKGGEAFFGFTDAYGNSVETSCRAR

SEQ ID NO: 3906 - protein, 126 aa, Neisseria
MNIRFFALTVPVLSLAACAVPEAYDDGGRGHMPPVQNQAGTDDFRAFSCENGLSVRVRHLDSGKVALRLDGRRAVLSSDVAASGERYTAEHGLFGNATEWHQKGGEAFFGFTDAYGNSVETSCRAR

SEQ ID NO: 3907 - protein, 126 aa, Neisseria
MNIRFFALTVPVLSLAACAVPEAYDDGGRGHMPPVQNQAGTADFRAFSCENGLSVHVRRLDGGRIALRLDGRRAVLSSDVAASGERYTAEHGLFGNGTEWHQKGGEAFFGFTDAYGNSVETSCRAR

SEQ ID NO: 3908 - protein, 491 aa, Neisseria
MSKPVFKKIALYTLGAISGVAVSLAVQGFAAEKDGRDNEVLPVQSIRTMAEVYGQIKANYYHDKPDADLFEGAMKGMVAGLDPHSEYMDKKGYAEIKESTSGEFGGLGMEIGQEDGFVKVVSPIEDTPAERAEVKSGDFIVKIDNVSTRGMTVSEAVKKMRGKPGTKITLTLSRKNADKPIVVNLTRAIIKVKSVRHHLIEPDYGYIRVSQFQERTVESVNTAAKELVKENKGKPLKGLVLDLRDDPGGLLTGAVGVSAAFLPSEAVVVSTKGRDGKDGMVLKAVPEDYVYGMGGDPLAGIPAELKTIPMTVLVNSGSASASEIVAGALQDHKRAVIVGTQSFGKGSVQTLIPLSNGSAVKLTTALYYTPNDRSIQAQGIVPDVEVKDKERTFESREADLVGHIGNPLGGEDVNSETLAVPLEKDADKPAAKEKGKKKKDEDLSSRRIPNPAKDDQLRKALDLVKSPEQWQKSLGLAAKKPVSNKDKKDKK

SEQ ID NO: 3909 - protein, 494 aa, Neisseria; identical to SEQ ID NO: 1880

SEQ ID NO: 3910 - protein, 494 aa, Neisseria
MSKPVFKKIALYTLGAISGVAVSLAVQGFAAEKDRRDNEVLPVQSIRTMAEVYGQIKANYYQDKPDADLFEGAMKGMVAGLDPHSEYMDKKGYAEIKESTSGEFGGLGMEIGQEDGFVKVVSPIEDTPAERAGVKSGDFIVKIDNVSTRGMTVSEAVKKMRGKPGTKITLTLSRKNADKPIVVNLTRAIIKVKSVRHHLIEPDYGYIRVSQFQERTVESVNTAAKELVKENKGKPLKGLVLDLRDDPGGLLTGAVGVSAAFLPSEAVVVSTKGRDGKDRMVLKAVPEDYVYGMGGDSLAGIPAELKTIPMTVLVNSGSASASEIVAGALQDHKRAVIVGTQSFGKGSVQTLIPLSNGSAVKLTTALYYTPNDRSIQAQGIVPDVEVKDKERIFESREADLVGHIGNPLGGEDVNSETLAVPLEKDADKPAVKEKGKKKKDEDLSSRRIPNPAKDDQLRKALDLVKSPEQWQKSLGLAAKKPVSNKDKKDKKDKK

SEQ ID NO: 3911 - protein, 123 aa, Neisseria
MMNPKTLGRLSLCAAVLALTACAGGGHKNLYYYGGYPDTVYEGLKNDDTSLGKQTEKMEKYFAEAANKKMNAAPGAHAHLGLLLSRSGDKEGAFRQFEEEKRLFPESGVFMDFLMKTGKGGKR

SEQ ID NO: 3912 - protein, 123 aa, Neisseria; identical to SEQ ID NO: 1683

SEQ ID NO: 3913 - protein, 123 aa, Neisseria; identical to SEQ ID NO: 1683

SEQ ID NO: 3914 - protein, 160 aa, Neisseria
MMKKILAVSALCLMTAAAQAADTYGYLAVWQNPQDANDVLQVKTTKEDSAKSEAFAELEAFCKGQDTLAGIAEDEPTGCRSVVSLNNTCVSLAYPKALGAMRVENAVVITSPRFTSVHQVALNQCIKKYGAQGQCGLETVYCTSSSYYGGAVRSLIQHLK

SEQ ID NO: 3915 - protein, 92 aa, Neisseria
SGIAEDEPTGCRSVVSLNNTCVALAYPKALGALRVDNAVVITSPRFTSVHQVALNQCIKKYGVQGQCGLETVYCTSSSYYGGTVRSLIQNLK

SEQ ID NO: 3916 - protein, 160 aa, Neisseria
MMKKILAVSALCLMTAAARAADTYGYLAVWQNPQNANDVLQVKTTKEDSTKSEAFAELEAFCKGQDTLAGIAEDEPTGCRSVVSLNNTCVALAYPKALGAMRVENAVVITSPRFTSVYQVALNQCIKKYGAQGQCGLETVYCTSSSYYGGTVRSLIQNLK

SEQ ID NO: 3917 - protein, 139 aa, Neisseria
MNLVKLLANNWQPIAIIALVGTGLAVSHHQGYKSAFAKQQAVIDKMERDKAQALLLSAQNYARELELARAEAKKYEVKAHAVGMALAKKQAEVSRLKTENKKEIENVLTQDRKNASGGCIDGFGSHGLQLYNRALGYGN

SEQ ID NO: 3918 - protein, 139 aa, Neisseria; identical to SEQ ID NO: 3895

SEQ ID NO: 3919 - protein, 258 aa, Neisseria
MNFIRSVGAKTLGLIQSFGSITLFLLNILAKSGTAFARPRLSVRQVYFAGVLSVLIVAVSGLFVGMVLGLQGYTQLSKFKSADILGYMVAASLLRELGPVLAAILFASSAGGAMTSEIGLMKTTGQLEAMNVMAVNPVARVVAPRFWAGVFSMPLLASIFNVAGIFGAYLVGVSWLGLDSGIFWPQMQNNITIHYDVINGLIKSAAFGVAVTLIAVHQGFHCIPTSEGILRASTRTVVSSALTILAVDFILTAWMFTD

SEQ ID NO: 3920 - protein, 258 aa, Neisseria; identical to SEQ ID NO: 2483

SEQ ID NO: 3921 - protein, 258 aa, Neisseria; identical to SEQ ID NO: 2483

SEQ ID NO: 3922 - protein, 108 aa, Neisseria
MNIKHLLLTAAATALLGISAPALAHHDGHGDDDHGHAAHQHGKQDKIISRAQAEKAAWARVGGKITDIDLEHDDGRPHYDVEIVKNGQEYKVVVDARTGRVISSRRDD

SEQ ID NO: 3923 - protein, 108 aa, Neisseria; identical to SEQ ID NO: 855

SEQ ID NO: 3924 - protein, 108 aa, Neisseria
MNFKRLLLTAAATALMGISAPALAHHDGHGDDDHGHAAHQHSKQDKIISRAQAEKAALARVGGKITDIDLEHDNGRPHYDVEIVKNGQEYKVVVDARTGRVISSRRDD

SEQ ID NO: 3925 - protein, 604 aa, Neisseria
MSAETTVSGARPAAKLPIYILPCFLWIGIIPFTFALRLKPSPDFYHDAAAAAGLIVLLFLTAGKKLFDVKIPAISFLLFAMAAFWWLQARLMNLIYPGMNDIASWVFILLAVSAWACKSLVAHYGQERIVTLFAWSLLIGSLLQSCIVVIQFAGWENTPLLQNIIVHRGQGVIGHIGQRNNLGHYLMWGILASAYLNGQRKIPAALGAICLIMQTAVLGLVNSRTILTYIAAIALILPFWYFRSDKSNRRTMLGIAAAVFLTALFQFSMNAILETFTGIRYETAVERVANGGFTDLPRQSEWNKALAAFQSAPIFGHGWNSFAQQTFLINAEQHTIHDNFLSTLFTHSHNIILQLLAEMGISGTLLVAATLLTGIAGLLKRSLTPASLFLLCALAVSMCHSMLEYPLWYVYFLIPFGLMLFLSPAEASDGIAFKKAANLGILTASAAIFAGLLHLDWTYTRLVNSFSPAADDSAKTLNRKINELRYISANSPMLSFYADFSLVNFALPEYPETQTWAEEATLKALKYRPYSATYRIALYLMRQGKVAEAKQWMRATQSYYPYLMPRYADEIRKLPVWAPLLPELLKDCKAFAAAPGHPETKPCK

SEQ ID NO: 3926 - protein, 604 aa, Neisseria; identical to SEQ ID NO: 1173

SEQ ID NO: 3927 - protein, 604 aa, Neisseria
MPAETTVSGAHPAAKLPIYILPCFLWIGIVPFTFALRLQPSPDFYHDAAAAAGLIVLLFLTAGKKLFDVKIPPISFLLFAMAAFWYLQARLMNLIYPGMNDIVSWIFILLAVSAWACRSLVAHYGQERIVTLFAWSLLIGSLLQSCIVVIQFAGWEDTPLFQNIIVYSGQGVIGHIGQRNNLGHYLMWGILAAAYLNGQRKIPPALGAICLIMQTAVLGLVNSRTILTYIAAIALILPFWYFRSDKSNRRTILGIAAAVFLTALFQFSMNTILETFTGIRYETAVERVANGGFTDLPRQIEWRKALAAFQSAPIFGHGWNSFAQQTFLINAEQHNIHDNLLSNLFTHSHNIVLQLLAEMGISGTLLVAATLLTGIAGLLKRPLTPASLFLICTLAVSMCHSMLEYPLWYVYFLIPFGLMLFLSPAEASDGIAFKKAANLGILTASAAIFAGLLHLDWTYTRMVNAFSPATDDSAKTLNRKINELRYISANSPMLSFYADFSLVNFALPEYPETQTWAEEATLKSLKYRPHSATYRIALYLMRQGKVAEAKQWMRATQSYYPYLMPRYADEIRKLPVWAPLLPELLKDCKAFAAAPGHPEAKPCK

SEQ ID NO: 3928 - protein, 197 aa, Neisseria
MAKKPNKPFRLTPKLLIRAVLLICITAIGALAVGIVSTFNPNGDKTLQTEPQHTDSPRETEFWLPNGAVGQDAAQPEHHHAASSEPAQPDGTEESGSGLPSPAAPKKNRVKPRPSDAARAADSLTGTGTQAENTLKETPVLPTNAPHPEPRKETPEKQAQPKETPKEKETPKENHTKPDTPKNTPAKPHKEILDNLF

SEQ ID NO: 3929 - protein, 191 aa, Neisseria
MAKKPNKPFRLTPKLLIRAVLLICIAAIGALAIGIVSTFNPNGDKTLQAEPQHTDSPRETEFWLPNGVVGQDAAQPEHHHAASSEPAQPDGTDESGSGLPSPAAPKKNRVKPQPADTAQTDRQPDDAGTQAENTLKETPVLPTNVPRPEPRKETPEKQAQPKETPKENHTKPDTPKNTPPKPHKEILDKLF

SEQ ID NO: 3930 - protein, 197 aa, Neisseria
MAKKPNKPFRLTPKLLIRAVLLICITAIGALAIGIVSTFNPNGDKTLQTEPQHTDSPRETEFWLPNGVVGQDAAQPEHHHASSSAPAQPDGTDESGSGLPSPAAPKKNRVKPQPADTAQTDRQPDDAGAQAENTLKETPVLPTNVPRPEPRKETPEKQAQPKETPKEKETPKENHTKPDTPKNTPPKPHKEILDNLF

SEQ ID NO: 3931 - protein, 92 aa, Neisseria
MSRNLLVRWLAVCLIPLATLAVFAANPPEDKPQHLINGIILACEATFLFKFVLFETIKHHLKQGFDLKRQTMFLFIPIVLLVVYLFHYFGAF

SEQ ID NO: 3932 - protein, 92 aa, Neisseria
MSRNLLVRWLAVCLIPLATLAVFAANPPEDKLQHLINGIILACEATFLFKFVLFDTIKHHLKQEFDLKRQTMLLFIPIILLIVYLFHYFGAF

SEQ ID NO: 3933 - protein, 92 aa, Neisseria
MSRNLLVRWLVVCLIPLATLAVFAANPPEDKPQHLINGIILACEATFLFKFVLFDTIKHHLKQEFDLKRQTMLLFIPIILLIVYLFHYFGAF

SEQ ID NO: 3934 - protein, 279 aa, Neisseria
VNRTTFCCLSLTAGPDSDRLQQRRGGGGGVAADIGTGLADALTAPLDHKDKGLKSLTLEASIPQNGTLTLSAQGAEKTFKAGGKDNSLNTGKLKNDKISRFDFVQKIEVDGQTITLASGEFQIYKQDHSAVVALRIEKINNPDKIDSLINQRSFLVSDLGGEHTAFNQLPDGKAEYHGKAFSSDDADGKLTYTIDFAAKQGHGKIEHLKTPEQNVELASAELKADEKSHAVILGDTRYGGEEKGTYRLALFGDRAQEIAGSATVKIGEKVHEIGIADKQ

SEQ ID NO: 3935 - protein, 274 aa, Neisseria; identical to SEQ ID NO: 506

SEQ ID NO: 3936 - protein, 274 aa, Neisseria
VNRTAFCCLSLTAALILTACSSGGGGVAADIGAVLADALTAPLDHKDKSLQSLTLDQSVRKNEKLKLAAQGAEKTYGNGDSLNTGKLKNDKVSRFDFIRQIEVDGQLITLESGEFQVYKQSHSALTALQTEQVQDSEHSGKMVAKRQFRIGDIAGEHTSFDKLPEGGRATYRGTAFGSDDASGKLTYTIDFAAKQGHGKIEHLKSPELNVDLAASDIKPDKKRHAVISGSVLYNQAEKGSYSLGIFGGQAQEVAGSAEVETANGIRHIGLAAKQ

SEQ ID NO: 3937 - protein, 783 aa, Neisseria
MVYGIAEADAGDSSVLTLGGMYQKSREVPDFSGIILPCENQKTAPFSSTPACNRPLQLPRNTYLGEDWSRLSADKYNLFSGFKHVFDNGWQLNAEVSYTKNESDAKVGQFFLKNEYAAGLSGEDAVGFLTEKNEVIPFEPKDKALEKLKAYRDETAKEYRERKDDFVKNRFDNTAFEQYRSRRAAERKAGFDKCMSDPFALDFICQGSWGDPGVDADKAEFVDKALAKEGIFNNAAQRFPNSLYDSSFNRKATANRRYSYMPLRHTKDDRQWGIKLDLTGTYGLFGREHDFFVGYAYGDEKIRSEYLEIYERRYRVRPNTGATHGVYAGSCQEEPDGDLSSPLVRGHKEPDWQAYDEKGNRTVYAEECRNAKKIKTEPKLDAEGKQVYYYDEYSGSRTPVYVDVYELDEKGNKIQETNPDGTPAFTGFSGTVPVWKTVKVADDHVPALYNYAKYLNTNKTHSLTASTRFNVTGRLHLLGGLHYTRYETSQTKDMPVRYGQPASDFQTASSIRADQDHYTAKMQGHKLTPYAGITYDLTPQQSIYGSYTKIFKQQDNVDVSAKTVLPPLVGTNYEVGWKGAFLQGRLNASFALFYLEQKNRTVVDFGYVPGAGGKQGSFQTVAKPIGKVVSRGAEFELSGELNEDWKVFAGYTYNKSRYKNAAEVNAERLAKNSSADPYNFSNFTPVHIFRFGTSFHIPNTGLTVGGGVSAQSGTSSLYNIRQGGYGLIDGFVRYELGKHAKLSLIGTNLNGRTYFENNYNRTRGANNFYGEPRTVSMKLDWQF

SEQ ID NO: 3938 - protein, 783 aa, Neisseria
MVYGIAEADAGDSSVLTLGGMYQKSREVPDFSGIILSCENQKTAPFSSTPACNRPLQLPRNTYLGEDWSRLSADKYNLFSGFKHVFDNGWQLNAEVSYTKNESDAKVGQFFLKNEHAAGLSDEDAVGFLTEKNEVIPFEPKDKALEKLKAYRDETAKEYRERKDDFVKNRFDNTAFEQYRSRRAAERKAGFDECMSAPFALDFICQGSWGDPGVDADKSEFVDKALAKEGIFNNAAQRFPNSLYDSSFNRKATANRRYSYMPLRHTKDDRQWGIKLDLTGTYGLFGREHDFFVGYAYGDEKIRSEYLEIYERRHRVRPNTGATHGVYAGSCQGEPDGDLSSPLVRGHKEPDWQAYDEKGNRTVYAEECRNAKKIKTEPKLDAEGKQVYYYDEYSGSRTPVYVDVYELDEKGNKIQETNPDGTPAFTGFSGTVPVWKTVKVADDHVPALYNYAKYLNTNKTHSLTAGTRFNVTGRLHLLGGLHYTRYETSQTKDMPVRYGQPASDFQTASSIKADQDHYTAKMQGHKLTPYAGITYDLTPQQSIYGSYTKIFKQQDNVDVSAKTVLPPLVGTNYEVGWKGAFLQGRLNASFALFYLEQKNRTVVDFGYVPGAGGKQGSFQTVAKPIGKVVSRGAEFELSGELNEDWKVFAGYTYNKSRYKNAAEVNAERLAKNTGADPYNFSNFTPVHIFRFGTSFHIPNTGLTVGGGVSAQSGTSSLYNIRQGGYGLIDGFVRYELGKHAKLSLIGTNLNGRTYFENNYNRTRGANNFYGEPRTVSMKLDWQF

SEQ ID NO: 3939 - protein, 187 aa, Neisseria
MNQNHFSLKILTVMLLSAYGGSFADGVVPVSDGNTVSLDTVNVRGSHALLGKTEKTRSYTIDRMSTATGMRIAGKDTPQSVSVITRSRLDDKAVHTLEEAMKNTTGVNVVRDSGLQTRFLSRGFYIDQIGEDGMTVNVAGRSGYTAKIDVSPSTDLAVYDHIEVVRGATGLTQSNSEPGGTVNLIRK

SEQ ID NO: 3940 - protein, 188 aa, Neisseria
MNQNHFSLKILTVMLLSAYGGSFADGVVPVSDGNTVSLDTVNVRGSHALSGKTEKTRSYTIDRMSTATGMRIAGKDTPQSVSVITRSRLDDKAVHTLEEAMKNTTGVNVVRDSGLQTRFLSRGFYIDQIGEDGITVNVAGRSGYTAKIDVSPSTDLAVYDHIEVVRGATGLTQSNSEPGGTVNLIRKR

SEQ ID NO: 3941 - protein, 531 aa, Neisseria; identical to SEQ ID NO: 1531

SEQ ID NO: 3942 - protein, 163 aa, Neisseria; identical to SEQ ID NO: 1487

SEQ ID NO: 3943 - protein, 346 aa, Neisseria
MSENKQNEVLTGYEQLKRRNRRRLVTASSLVAASCILLAAALSSDPADSNPAPQAGETGATESQTANTAQTPALKSAAENGETAADKPQDLAGEDKPSAADSEISEPENVGAPLVLINDRLEDSNIKGLEESEKLQQAETAKTEPKQAKQRAAEKVSATADSTDTVAVEKPKRTAEPKPQKAERTAEAKPKAKETKTAEKVADKPKTAAEKTKPDTAKSDSAVKEAKKADKAEGKKTAEKDRSDGKKHETAQKTDKADKTKTAEKEKSGKAGKKAAIQAGYAEKERALSLQRKMKAAGIDSTITEIMTDNGKVYRVKSSNYKNARDAERDLNKLRVHGIAGQVTNE

SEQ ID NO: 3944 - protein, 332 aa, Neisseria; identical to SEQ ID NO: 1267

SEQ ID NO: 3945 - protein, 332 aa, Neisseria
MSENKQNEVLSGYEQLKRRNRRRLVTASCLVAASCILLAAALSSGPAEQTAGETSGVENKAAGAAQTPALKSAADKPQDLAGEDKPSAADSEISEPENVGAPLVLINDRLEDSNIKGLEASEKLQQAETAKTAPKQAKQRAAEKVPATADSTDTVAVEKPKRTAETKPQKAERTAKAKPKAKETKTAEKVADKPKTAAEKTKPDTAKSDSAVKEAKKADKAESKKTAEKDRSDGKKHETAQKTDKADKTKTAEKEKSGKKAAIQAGYAEKERALSLQRKMKAAGIDSTITEIMTDNGKVYRVKSSNYKNARDAERDLNKLRVHGIAGQVTNE

SEQ ID NO: 3946 - protein, 102 aa, Neisseria
LTPWADAYADLRGKTKVMTTQMGASRDVSKSAKGWSVGIGLNVGKQLTDSVGLEFDPYYRHKTIYKPREIVLDGDKTKMGRSKSNEYGFRVAATFYSQLKSK

SEQ ID NO: 3947 - protein, 102 aa, Neisseria
LTPWADAYADLRGKTKVMTTQMCASRDVSKSAKGWSVGIGLNVGKQLTDSVGLEFDPYYRHKTICKPREIVLDGDKTKMGRSKSNEYGFRVTATFYSQLKSK

SEQ ID NO: 3948 - protein, 421 aa, Neisseria
MSQNQPAQPTKRNLFKTALAVGAIGAIGGYFGGKKQGETAERTAESQHSPQAYPCYGEHQAGIVTPRQAFSIMCAFDVTAQSAKQLENLFRTLTARIEFLTQGGEYQDGDDKLPSAGSGILGKAFNPDGLTVTVGVGSSLFDGRFGLKDKKTVHLQEMRDFPNDKLQKSWCDGDLSLQICAFTPETCQTALRDIIKHTAQTAVIRWSIDGWQPKSEPGAMAARNLLGFRDGTGNPKVSDPKTADEVLWTGVAANSLDEPEWAKNGSYQAVRLIRRFVEFWDRTPLQEQTDIFGRRKYSGAPMDGKKEADQPDFAKDPEGDITPKDSHMRLANPRDPEFLKKHCLFRRAYSYSRGPASSGQLDVGLVFVCYQANLADGFIFVQNLLNGEPLEEYISPFGGGYFFVLPGVGKGGFLGQGLPGV

SEQ ID NO: 3949 - protein, 421 aa, Neisseria; identical to SEQ ID NO: 637

SEQ ID NO: 3950 - protein, 421 aa, Neisseria
MSKNQPAQPTRRTLFKTAIAAGAVGAIGGYLGGKKRGETAERTAESQHSPQAYPCYGEHQAGIVTPQQAFSIMCAFDVTAQSAKQLENLFRTLTARIEFLTQGGEYQDGDDKLPPAGSGILGKAFNPDGLTVTVGVGSSLFDGRFGLKDKKPIHLQEMRDFSNDKLQKSWCDGDLSLQICAFTPETCQAALRDIIKHTVQTAVIRWSIDGWQPKSEPGAMAARNLLGFRDGTGNPKVSDPKTADEVLWTGVAANSLDEPEWAKNGSYQAVRLIRHFVEFWDRTPLQEQTDIFGRRKYSGAPMDGKKEADQPDFAKDPEGNTTPKDSHIRLANPRDPEFLKKHRLFRRAYSYSRGLASSGQLDVGLVFVCYQANLADGFIFVQNLLNGEPLEEYISPFGGGYFFVLPGVEKGGFLGQGLLGV

SEQ ID NO: 3951 - protein, 388 aa, Neisseria
MRKFNLTALSVMLALGLTACQPPEAEKAAPAASGETQSANEGGSVGIAVNDNACEPMNLTVPSGQVVFNIKNNSGRKLEWEILKGVMVVDERENIAPGLSDKMTVTLLPGEYEMTCGLLTNPRGKLVVADSGFKDTANEADLEKLPQPLADYKAYVQGEVKELAAKTKTFTEAVKAGDIEKAKSLFAATRVHYERIEPIAELFSELDPVIDACEDDFKDGAKDAGFTGFHRIEHALWVEKDVSGVKETAAKLMTDVEALQKEIDALAFPPGKVVGGASELIEEAAGSKISGEEDRYSHTDLSDFQANADGSKKIVDLFRPLIEAKNKALLEKTDTNFKQVNEILAKYRTKDGFETYDKLSEADRKALQAPINALAEDLAQLRGILGLK

SEQ ID NO: 3952 - protein, 388 aa, Neisseria; identical to SEQ ID NO: 636

SEQ ID NO: 3953 - protein, 388 aa, Neisseria; identical to SEQ ID NO: 3602

SEQ ID NO: 3954 - protein, 323 aa, Neisseria
VKPRFYWAACAVLPAACSPEPAAEKTVSAASQAASTPVATLTVPTARGDAVVPKNPERVAVYDWAALDTLTEPGVNVGATTAPVRVDYLQPAFDKAATVGTLFEPDCESLHRHNPQFVITGGPGAEAYEQLAKNATTIDLTVDNGNIRTSGEKQMETLSRIFGKEARVAELNAQIDALFAQKREAAKGKGRGLVLSVTGNKVSAFGTQSRLASWIHGDIGLPPVDESLRNEGHGQPVSFEYIKEKNPGWIFIIDRTAAIGQEGPAAVEVLDNALVCGTNAWKRKQIIVMPAANYIVAGGARQLIQAAEQLKAAFEKAEPVAAQ

SEQ ID NO: 3955 - protein, 321 aa, Neisseria
VKPRFYWAACAVLLTACSPEPAAEKTVSAASASAATLTVPTARGDAVVPKNPERVAVYDWAALDTLTELGVNVGATTAPVRVDYLQPAFDKAATVGTLFEPDYEALHRYNPQLVITGGPGAEAYEQLAKNATTIDLTVDNGNIRTSGEKQMETLARIFGKEARAAELKAQIDALFAQTREAAKGKGRGLVLSVTGNKVSAFGTQSRLASWIHGDIGLPPVDESLRNEGHGQPVSFEYIKEKNPDWIFIIDRTAAIGQEGPAAVEVLDNALVRGTNAWKRKQIIVMPAANYIVAGGARQLIQAAEQLKAAFKKAEPVAAGKK

SEQ ID NO: 3956 - protein, 321 aa, Neisseria
VKPRFYWAACAVLLTACSPEPAAEKTVSAASASAATLTVPTARGDAVVPKNPERVAVYDWAALDTLTELGVNVGATTAPVRVDYLQPAFDKAATVGTLFEPDYEALHRYNPQLVITGGPGAEAYEQLAKNATTIDLTVDNGNIRTSGEKQMETLARIFGKEARAAELKAQIDALFAQTREAAKGKGRGLVLSVTGNKVSAFGTQSRLASWIHGDIGLPPVDESLRNEGHGQPVSFEYIKEKNPDWIFIIDRTAAIGQEGPAAVEVLDNALVRGTNAWKRKQIIVMPAANYIVAGGSRQLIQAAEQLKEAFEKAEPVAAGKE

SEQ ID NO: 3957 - protein, 337 aa, Neisseria; identical to SEQ ID NO: 2291

SEQ ID NO: 3958 - protein, 470 aa, Neisseria
MKISRPPEFTLLQQEYMQHLTERMTQIAKLLNSSANNPDIDIPDFLTEIKDYSEFSVTDENGTYLHWDKFRRIHTEDTRMKWRAVKESRKKIQKPIDFPFEHQFWFCIPDSLQARLHLIDKSCGSSIGTSSLGGFGRSEQNRFLLKSLIMEEAITSAQLEGAATTRKVAKDMLKSQRKPKTKDEIMIVNNYHLMKKAVELKNTPLSVEMILDLHRIATSNAIENKAEPGQFRQDDEIFIADINGNSLYQPPPHGQVHTLMEEVCAFANNTYDGVENPFIHPVVQAIILHFLIGYIHPFGDGNGRTARALFYWFMLKNGYWLFEYISISRLLKNAPAQYAKSYLYAETDDLDLTYFIYYQCDIIKRAVADLEHYISDKQKHQQEFKAAIAQYTEKIGKLNQRQIGILQKAVEESGKIFTAQEIANQYGISLNTARSDLSKLGEYRFLVPFKSGNALEYVAPQDLLERLEKK

SEQ ID NO: 3959 - protein, 470 aa, Neisseria; identical to SEQ ID NO: 3958

SEQ ID NO: 3960 - protein, 152 aa, Neisseria
MPITPPLNIISPKLYPNEQWNESEALGAITWLWYQSPTHRQVPIVEMMTYILPVLKNGQFALFCKGTQPIGYISWAYFDEVAQAHYLESDRHLRDNSDWNCGDNIWLIQWFAPLGHSHQMRSAVRQLFPSTTVRALYHKGSDKGLRILTFKT

SEQ ID NO: 3961 - protein, 429 aa, Neisseria
MMKSILTVSGNRMRKPRITYLDVWANDERIGTLEKGAMYRFAYDNPNSSLLGLHYQDRSKVYISNNMPHIFAQYFPEGFLDAHITSKYAFHDAPFEDNEMLRLAILCRETLGRIHVRCNDPLFNEWIDGLEMKNPRILTERDLLGINARQVFQQYMAEIFHHGRFVSVSGIQQKMSLDAIRRNTKQTASYIAKGFDASEYPCLAANEFLCMQTIKQAGIAVAQTSLSEDSSVLLVRRFDVSEQGYFLGMEDFTSLRQYSVEDKYKGSYAAIAQIIRQISGRPDEDLIHFFNQLAASCILKNGDAHLKNFSVLYHDEYDVRLAPVYDVLDTSIYRVGTQGIFDAYDDTLALNLTNHGKKTYPSKNTLLDFAEKYCDLGREDASFMIDTIVQAKEQVLVKYSDVLRENEWLAQKWHFIPDENEEGLPFTFR

SEQ ID NO: 3962 - protein, 145 aa, Neisseria; identical to SEQ ID NO: 2279

SEQ ID NO: 3963 - protein, 186 aa, Neisseria; identical to SEQ ID NO: 1396

SEQ ID NO: 3964 - protein, 186 aa, Neisseria
  VARIANT (1)...(186): Xaa = Any Amino Acid
MTANFAQTLVEIQDSLXRVVSTVQYGDDNLKRLTADKRKQYELNFKISEGSTRVESDFKETLVRFGRDMLQDMPPKIRSATLVALTTLLVGGALGYGYLEYLKQVASEGYQTERLYNAVDRLAESQERITSAILKGARGADFVQIGRRSYSREDISEANRRAERVPYGAELVSDGNFTAVLSDIGD

SEQ ID NO: 3965 - protein, 187 aa, Neisseria; identical to SEQ ID NO: 1577

SEQ ID NO: 3966 - protein, 167 aa, Neisseria
MNNLTVFTRFDTDLATLADELQYVWEHTAVTDHQGKLVEIPVCYGGEYGPDLAEVAAFHQTVISEIVRRHTAQTYTVFMMGFQPGFPYLGGLPEALHTPRRAVPRTSVPAGSVGIGGSQTGVYPFASPGGWQIIGRTELPLFRADLNPPTLLAAGDQVRFVAERIEP

SEQ ID NO: 3967 - protein, 167 aa, Neisseria; identical to SEQ ID NO: 3966

SEQ ID NO: 3968 - protein, 1431 aa, Neisseria; identical to SEQ ID NO: 2514

SEQ ID NO: 3969 - protein, 154 aa, Neisseria
NNRNTRYAALGKRVMEGVETEISGAITPKWQIHAGYSYLHSQIKTAANPRDDGIFLLVPKHSANLWTTYQVTPGLTVGGGVNAMSGITSSAGMHAGGYATFDAMAAYRFTPKLKLQINADNIFNRHYYARVGGTNTFNIPGSERSLTANLRYSF

SEQ ID NO: 3970 - protein, 708 aa, Neisseria; identical to SEQ ID NO: 2350

SEQ ID NO: 3971 - protein, 703 aa, Neisseria; identical to SEQ ID NO: 880

SEQ ID NO: 3972 - protein, 703 aa, Neisseria
MKISFHLALLPTLIIASFPVAAADTQDNGEHYTATLPTVSVVGQSDTSVLKGYINYDEAAVTRNGQLIKETPQTIDTLNIQKNKNYGTNDLSSILEGNAGIDAAYDMRGESIFLRGFQADASDIYRDGVRESGQVRRSTANIERVEILKGPSSVLYGRTNGGGVINMVSKYANFKQSRNIGTVYGSWANRSLNMDINEVLNKNVAIRLTGEVGRANSFRSGIDSKNVMVSPSITVKLDNGLKWTGQYTYDNVERTPDRSPTKSVYDRFGLPYRMGFAHRNDFVKDKLQVWRSDLEYAFNDKWRAQWQLAHRTAAQDFDHFYAGSENGNLIKRNYAWQQTDNKTLSSNLTLNGDYTIGRFENHLTVGMDYSREHRNPTLGFSSAFSASINPYDRASWPASGRLQPILTQNRHKADSYGIFVQNIFSATPDLKFVLGGRYDKYTFNSENKLTGSSRQYSGHSFSPNIGAVWNINPVHTLYASYNKGFAPYGGRGGYLSIDTLSSAVFNADPEYTRQYETGVKSSWLDDRLSTTLSAYQIERFNIRYRPDPKNNPYIYAVSGKHRSRGVELSAIGQIIPKKLYLRGSLGVMQAKVVEDKENPDRVGIHLNNTSNVTGNLFFRYTPTENLYGEIGVTGTGKRYGYDSRNKEVTTLPGFARVDAMLGWNHKNVNVTFAAANLFNQKYWRSDSMPGNPRGYTARVNYRF

SEQ ID NO: 3973 - protein, 147 aa, Neisseria
MKWLLNMIMRPIKFSMVNTLLFIVICSSFFDLLVQLCTILFHSQKIYFITLFLLFIFNFVTKSIYMAIIYPILYFFTIKKYYPYSRKVIILLSLALSIYFSFMDFYFFSIYSDNLSYETEPLHLYIPIIINFFSLLVSNFILSFINK

SEQ ID NO: 3974 - protein, 147 aa, Neisseria; identical to SEQ ID NO: 3973

SEQ ID NO: 3975 - protein, 467 aa, Neisseria; identical to SEQ ID NO: 2265

SEQ ID NO: 3976 - protein, 467 aa, Neisseria
MTLLNLMIMQDYGISVCLTLTPYLQHELFSAMKSYFSKYILPVSLFTLPLSLSPSVSAFTLPEAWRAAQQHSADFQASHYQRDAVRARQQQAKAAFLPHVSANASYQRQPPSISSTRETQGWSVQVGQTLFDAAKFAQYRQSRFDTQAAEQRFDAAREELLLKVAESYFNVLLSRDTVAAHAAEKEAYAQQVRQAQALFNKGAATALDIHEAKAGYDNALAQEIAVLAEKQTYENQLNDYTGLDSKQIEAIDTANLLARYLPKLERYSLDEWQRIALSNNHEYRMQQLALQSSGQALRAAQNSRYPTVSAHVGYQNNLYTSSAQNNDYHYRGKGMSVGVQLNLPLYTGGELSGKIHEAEAQYGAAEAQLTATERHIKLAVRQAYTESGAARYQIMAQERVLESSRLKLKSTETGQQYGIRNRLEVIRARQEVAQAEQKLAQARYKFMLAYLRLVKESGLGLETVFAE

SEQ ID NO: 3977 - protein, 475 aa, Neisseria; identical to SEQ ID NO: 2266

SEQ ID NO: 3978 - protein, 435 aa, Neisseria
MFFSALKSFLSRYITVWRNVWAVRDQLEPPKRTAEEQAFLPAHLELTDTPVSAAPKWAARFIMAFALLALLWSWFGKIDIVAAASGKTVSGGRSKTIQPLETVVVKAVHVRDGQHVKQGETLAELEAVGTDSDVVQSEQALQAAQLSKLRYEAVLAALESRTVPHIDMAQARSLGLSDADVQSAQVLAQHQYQAWAAQDAQLQSALRGHQAELQSAKAQEQKLVSVGAIEQQKTADYRRLRADNFISEHAFLEQQSKSVSNWNDLESTRGQMRQIQAAIAQAEQNRVLNTQNLKRDTLDALRQANEQIDQYRGQTDKAKQRQQLMTIQSPADGTVQELATYTVGGVVQAAQKMMVVAPDDDKMDVEVLVLNKDIGFVEQGQDAVVKIESFPYTRYGYLTGKVKSVSHDAVSHEQLGLVYTAVVSLDKHTLNIDGK

SEQ ID NO: 3979 - protein, 309 aa, Neisseria
MLRCRPKSVLDSDGIFLKFNFLRSKPKYEISFLPSFKRILCLSAVISVLGACAVVADVYGHDSATMNAAAAKDYMKTVELNKSAGNVDTTSRTARRVQAVFRRMLPYADAANNTSHKFDWKMTVFKNDELNAWAMPGGKMAFYTGIVDKLKLTDDEIAAIMGHEMTHALHEHGKNKVGQQILTNTAAQIGTQIILDKKPDTNPELVGLGMDILGTYGLTLPYSRSLEEEADEGGMMLMAQAGYHPAAAVRVWEKMNQENDQNGFIYAITSTHPTNNARIENLKRLLPTVMPVYEQSVRNKGRVNKKRRR

SEQ ID NO: 3980 - protein, 309 aa, Neisseria
MLRCRPKSVLDSDGIFLKFNFLRSKPKYEISFLPSFKRILCLSAVISVLGACTVVADVYGQDSATMNAAAAEDYMKTVELNKSAGNVDTTSKTARRVQAVFRRMLPYADAANNTGHKFDWKMTVFKNDELNAWAMPGGKMAFYTGIVDKLKLTDGEIAAIMGHEMTHALHEHGKNKVGQKILTNMAAQIGTQIILDKKPDTNPELVGLGMDILGMYGITLPYSRSLEEEADEGGMMLMAQAGYHPAAAVRVWEKMNQENDQNGFIYAITSTHPTNNARIENLKRLLPTVMPVYEHSVRNKGRVNKNRRR

SEQ ID NO: 3981 - protein, 214 aa, Neisseria
MKFKHLLPLLLSAVLSAQAYALTEGEDYLVLDKPIPQEQPGKIEVLEFFGYFCVHCHHFDPLLLKLGKALPSDTYLRTEHVVWRPEMLGLARMAAAVKLSGLKYQANSAVFKAVYEQKIRLENRAVAGKWALSQKGFDGKKLMRAYDSPEAAAVALKMQKLTEQYGIDSTPTVIVGGKYRVIFNNGFDGGVHTIKELVAKVREERKRQTPAVQK

SEQ ID NO: 3982 - protein, 214 aa, Neisseria; identical to SEQ ID NO: 989

SEQ ID NO: 3983 - protein, 214 aa, Neisseria
MKLKHLLPLLLSAVLSAQAYALTEGEDYLVLDKPIPQKQSGKIEVLEFFGYFCVHCHHFDPLLLKLGKALPSDAYLRTEHVVWQPEMLGLARMAAAVKLSGLKYQANPAVFKAVYEQKIRLENRSVAEKWALSQKGFDGKKLMRAYDSPAAAAAASKMQQLTEQYRIDSTPTVVVGGKYRVIFNNGFDGGVHTIKELVAKVREERKRQTPAVQK

SEQ ID NO: 3984 - protein, 119 aa, Neisseria
MNIKQLITAALIASAAFATQAAPQKPVSAAQTAQHSAVWIDVRSEQEFSEGHLHNAVNIPVDQIVRRIYEAAPDKDTPVNLYCRSGRRAEAALQELKKAGYTNVANHGGYEDLLKKGMK

SEQ ID NO: 3985 - protein, 119 aa, Neisseria; identical to SEQ ID NO: 1359

SEQ ID NO: 3986 - protein, 119 aa, Neisseria
MNIKHLITAALIASAAFAAQAAPQKPVSAAQTAQHSAVWIDVRSEQEFSEGHLHNAVNIPVDQIVRRIHEAAPDKDTPVNLYCRSGRRAEAALQELKKAGYTNVANHGGYEDLLKKGMK

SEQ ID NO: 3987 - protein, 491 aa, Neisseria
LIMVIFYFYFCGKTFMPARNRWMLLPLLASAAYAEETPCEPDLRSRPEFRLHEAEVKPIDREKVPGQVREKGKVLQVDGETLLKNPELLSRAMYSAVVSNNIAGIRVILPIYLQQARQDKMLALYAQGILAQAEGRVKEAVSHYRELIAAQPDAPAVRMRLAAALFEDRQNEAAADQFDRLKTEDLPPQLMEQVELYRKALRERDAWKVNGGFSVTREHNINQAPKQQQYGNWTFPKQVDGTAVNYRFGAEKKWSLKNGWYTTAGGDVSGRVYPGNKKFNDMTAGVSGGIGFADRRKDVGLAVFHERRTYGNDAYSYANGARLYFNRWQTPRWQTLSSAEWGRLKNTRRARSDNTHLQISNSLVFYRNARQYWTGGLDFYRERNPADRGDNFNRYGLRFAWGQEWGGSGLSSLFRLGVAKRHYEKPGFFSSFKGERRRDKESDTSLSLWHRALHFKGITPRLTLSHRETWSNDVFNEYEKNRAFVEFNKTF

SEQ ID NO: 3988 - protein, 490 aa, Neisseria
LIMVIFYFCGKTFMPARNRWMLLLPLLASAAYAEETPREPDLRSRPEFRLHEAEVKPIDREKVPGQVREKGKVLQIDGETLLKNPELLSRAMYSAVVSNNIAGIRVILPIYLQQAQQDKMLALYAQGILAQADGRVKEAISHYRELIAAQPDAPAVRMRLAAALFENRQNEAAADQFDRLKAENLPPQLMEQVELYRKALRERDAWKVNGGFSVTREHNINQAPKRQQYGKWTFPKQVDGTAVNYRLGAEKKWSLKNGWYTTAGGDVSGRVYPGNKKFNDMTAGVSGGIGFADRRKDAGLAVFHERRTYGNDAYSYTNGARLYFNRWQTPKWQTLSSAEWGRLKNTRRARSDNTHLQISNSLVFYRNARQYWMGGLDFYRERNPADRGDNFNRYGLRFAWGQEWGGSGLSSLLRLGAAKRHYEKPGFFSGFKGERRRDKELNTSLSLWHRALHFKGITPRLTLSHRETRSNDVFNEYEKNRAFVEFNKTF

SEQ ID NO: 3989 - protein, 490 aa, Neisseria
LIMVIFYFCGKTFMPARNRWMLLLPLLASAAYAEETPREPDLRSRPEFRLHEAEVKPIDREKVPGQVREKGKVLQIDGETLLKNPELLSRAMYSAVVSNNIAGIRVILPIYLQQAQQDKMLALYAQGILAQADGRVKEAISHYRELIVAQPDAPAVRMRLAAALFENRQNEAAADQFDRLKAENLPPQLMEQVELYRKALRERDAWKVNGGFSVTREHNINQAPKRQQYGKWTFPKQVDGTAVNYRLGAEKKWSLKNGWYTTAGGDVSGRVYPGNKKFNDMTAGVSGGIGFADRRKDAGLAVFHERRTYGNDAYSYTNGARLYFNRWQTPKWQTLSSAEWGRLKNTRRARSDNTHLQISNSLVFYRNARQYWMGGLDFYRERNPADRGDNFNRYGLRFAWGQEWGGSGLSSLLRLGAAKRHYEKPGFFSGFKGERRRDKELNTSLSLWHRALHFKGITPRLTLSHRETRSNDVFNEYEKNRAFVEFNKTF

SEQ ID NO: 3990 - protein, 186 aa, Neisseria
MNRLLLLSAAVLPTACGSGETDKIGRASTVFNMLGKNDRIEVEGFDDPDVQGVACYISYAKKGGLKEMVNLEEDASDASVSCVQTASSISFDETAVRKPKEVFKRGTGFAFKSRQIVRYYDPKRKAFAYLVYSDKIVQGSPKNSLSAVSCFGSGIPQTDGVQADTSGKLLAGACIISNPIKNPDKR

SEQ ID NO: 3991 - protein, 186 aa, Neisseria; identical to SEQ ID NO: 1883

SEQ ID NO: 3992 - protein, 186 aa, Neisseria
MNRLLLLSAAVLLTACGSGETDKIGRASTVFNILGKNDRIEVEGFDDPDVQGVACYISYAKKGGLKEMVNLEEDASDASVSCVQTASSISFDETAVRKPKEVFKHGASFAFKSRQIVRYYDPKRKTFAYLVYSDKIIQGSPKNSLSAVSCFGGGIPQTDGVQADTSGNLLAGACMISNPIENPDKR

SEQ ID NO: 3993 - protein, 700 aa, Neisseria
MDLLSVFHKYRLKYAVAVLTMLLLAAVGLHASVYRTFTPENIRSRLQQSIAHTHRKISFDADIRRRLLPRPTVILKNLTITEPDGGRVAVSVKETKIGLSWKNLWSDRIQVEKWVVSGADLALTRDRNGAWNIQDLFDGAKHSASVNRIIVENSTVRLNFLQQQLILKEISLNLQSPDSSGQQFESSGILVWRKLSVPWKSRGLFLSDGIGTPEISPFHFEASTSLDGHGITISTTGSPSVRFNAGGADAAGLGLRADTSFRNLHLTAQIPALALKNNSIKTGTVNGTFTAGGEYARWDGSFKLDKANLHSGIANIGNAEISGSFKTPRLQTNFSLGSPLVWSRDNGLDAPRLHISTLQDTVDRLPQPRFISRLDGSLSIPNLQNWNAELNGTFDRQPVAAKFKYTREGAPHLEAAAALQKLNLAPYLDEFRQQNGKIFPDILGRLSGNVEAHLKIGSIQLPGLQLDDMETYLHADKDHIALSRFKSGLYGGHTEGGISIANTRPATYRLQQNASNIQIQPLLQDLFGFHSFSGNGDAVIDLTASGENRKQLIRSLQGSLSLNISNGAWHGIDMDSILKNGLSGKISGSTPFYRFTLNSEISDGISRHIDTELFSDSLYVTSNGYTNLDTQELSEDVLIRNAVHPKNKPIPLKITGTVDKPSITVDYGRLTGGINSRKEKQKILEDTLLEQWQWLKPKEP

SEQ ID NO: 3994 - protein, 704 aa, Neisseria; identical to SEQ ID NO: 2225

SEQ ID NO: 3995 - protein, 704 aa, Neisseria
MDLLSVFHKYRLKYAVAVLTILLLAAIGLHASVYRIFTPENIRSRLQQSIAHTHRKISFDADIQRRLLPRPTVILKNLTITEPGGDRTAVSVQETKIGLSWKNLWSDQIQIEKWVVSSAELALTRDGKGVWNIQDLIDSQKRQASVNRIIVENSTVRLNFLQEQLILKEINLNLQSPDSSGQPFESSGILVWGKLSVPWKSRGLFLSDGIGTPKISPFHFEASTSLDGHGITISTTGSPSVRFNAGGADAAGLGLRADTSFRNLHLTAQIPTLALRNNSIKIETVNGAFTAGGEYAQWDGSFKLDKANLHSGIANIGNAEISGSFKTPRHQTNFSLNSPLVWTENKGLDAPRLYVSTLQDTVNRLPQPRFISRLDGSLSVPNLQNWNAELNGTFDRQTVAAKFRYTHEDAPHLEAAVALQKLNLTPYLDDVRQQNGKIFPDTLAKLSGDIEAHLKIGKVQLPGLQLDDMETYLHADKGHIALSRFKSGLYGGHTEGGISIANTRPATYRLQQNASNIQIQPLLQDLFGFHSFSGNGDAVIDLTAGGETRKELIRSLQGSLSLNISNGAWHGIDMDNILKNGISGKTADNAAPSTPFHRFTLNSEISDGISRHIDTELFSDSLYVTSNGYTNLDTQELSEDVLIRNAVHPKNKPIPLKITGTVDKPSITVDYGRLTGGINSRKEKQKILEDTLLEQWQWLKPKEP

SEQ ID NO: 3996 - protein, 297 aa, Neisseria
VFGTVLRTDADCLQIIVVGKFFQVVAYGFAALAEGEFHQFGEMIEIVRLADTVFHRNHAHHCGIDFRRGIERFGRHVNQQLHIEKILQHHTQATVVVAFRRGNHALDHFFLQHKVHIGDIVRHLRQFEQKRRGDVIRQVADDFLFADAVEIKLQHVAFVNHQFIRKRQRFQTAYDVAVDFDNVQAVQLFRQRFGNCRQTRADFNHDIIRLRAHGVDNIADNPRVLQKILPETLAGFVFFHRVSSSVETPPFRAAGSDSVWAGRNPFQIRTTHRAVLYVSSCVLEHKCVYSIRLMSAL

SEQ ID NO: 3997 - protein, 298 aa, Neisseria
MFGAVLRIDADCLQIIVACKLFQIVAYGFAALVEGEFHEFGKMLEIVRLADAVFHRNHTDDGGIHFRRRVERFGRYVNQHFHIEKILQHHAQAAVVVAFRRGNHTLDHFFLQHKVHIDDIVRHLRQLEQKRCGNVVREVADDFLFACDAVEIKLQYIAFVNHQFIRKRQRFQTAYDVAVDFDNVQAVQLFRQRFGNRRQTRADFNHDIIRLRAHGVDNIADNPRVLQKILPETLAGFVFFHRVSFSVETPPFRAVESDSIWEGRNSFQIRMAHRAVLYVSSCVLKHKCVYSIRLMSAL

SEQ ID NO: 3998 - protein, 298 aa, Neisseria
MFGAVLRIDADCLQIIVACKLFQIVAYGFAALVEGEFHEFGEMLEIVRLADTVFHRNHADDGRIHFRRGVERFGRHVNQHFHIEEILQHHAQAAVVVAFRRGNHTIDHFFLQHKVHIDDIVRHLRQLEQKRRGNVVGQVADDFLFACDAVEIKLQYIAFVNHQFIRKRQRFQTAYDVAVDFDNVQAVQLFRQRFGNRRQTRTDFNHDIIRLRAHGVDNIADNPRVLQKILPETLAGFVFFHRVSFSVETPPFRAVESDSIWEGRNSFQIRTAHRAVLYVSSCVLKHKCVYSIRLMSAL

SEQ ID NO: 3999 - protein, 260 aa, Neisseria
MGLGATTFVGSGAIGGGLCSTGIGCAAGGLIATAGMTGGYTQASEGSRQLFGTYQSDFGKKVVLSLGTPIEYESPLVSDAKNLAVWGLETLITRKLGNLATGVKTSLTPKTADVQRNILSQSEVGIKWGKGIEGQGMPWEDYVGKGLSANARLPKNFKTFDYFDRGTGTAISAKTLDTQTTARLSKPEQLYSTMKGYIDKTANFKSYELSEVPLRADMIKQREIHLAIPAQTNKEQRLQLQRVVEYGKSQNITVKITEIE

SEQ ID NO: 4000 - protein, 237 aa, Neisseria
MKTKLPLFIIWLSVSASCASVLPVPEGSRTEMPTQENASDGIPYPVPTLQDRLDYLEGKIVRLSNEVEMLNGKVKALEHTKIHPSGRTYVQKLDDRKLKEHYLNTEGGSASAHTVETAQNLYNQALKHYQNGRFSAAAALLKGADGGDGGSIAQRSMYLLLQSRARMGNCESVIEIGGRYANRFKDSPTAPEVIFKIGECQYRLQQKDIARATWRSLIQTYPGSPAAKRAAAAVRKR

SEQ ID NO: 4001 - protein, 237 aa, Neisseria; identical to SEQ ID NO: 1982

SEQ ID NO: 4002 - protein, 238 aa, Neisseria
MKTKLPLFIIWLSVSAACSSPVSRNIQDMRLEPQAEAGSSDAIPYPVPTLQDRLDYLEGTLVRLSNEVETLNGKVKALEHAKTHPSSRAYVQKLDDRKLKEHYLNTEGGSASAHTVETAQNLYNQALKHYKSGRFSAAASLLKGADGGDGGSIAQRSMYLLLQSRARMGNCESVIEIGGRYANRFKDSPTAPEAMFKIGECQYRLQQKDIARATWRSLIQTYPGSPAAKRAAAAVRKR

SEQ ID NO: 4003 - protein, 342 aa, Neisseria; identical to SEQ ID NO: 1966

SEQ ID NO: 4004 - protein, 343 aa, Neisseria
MARRSKTFEEAAAEVEERFGHRGIKLVEFEGTAKPCVINCPKHGNQTCSRYSNMFIGSSWGCPSCGNEQAAKAGIATLRKNHIALEMLKQAVTGMTKQERITTQAYNEMTKSVAGSNSIILNDVQGDTTINNHHTHTHNHSDADGKALSMRLTPRPLLSDRQAAAFARTGKLTGSFDLFASVVAPSQYTFAVAMPDTSMSPVIEKGDLLVVEPRMRPADEDIVLIELSDKRLVVAHLVIDIAGRMLIYQTGRPSEALDLPEGSVILGVVLESKNGLCPPHRQEGVLIRITAPDVWTVGTISASKTSCTRPTAARKSAVCFLRFWQATRGIPKTRSWRNPNNAC

SEQ ID NO: 4005 - protein, 800 aa, Neisseria
MVNYYSAMIKKILTTCFGLFFGFCVFGVGLVAIAILVTYPKLPSLDSLQHYQPKMPLTIYSADGEVIGMYGEQRREFTKIGDFPEVLRNAVIAAEDKRFYRHWGVDVWGVARAAVGNVVSGSVQSGASTITQQVAKNFYLSSEKTFTRKFNEVLLAYKIEQSLSKDKILELYFNQIYLGQRAYGFASAAQIYFNKNVRDLTLAEAAMLAGLPKAPSAYNPIVNPERAKLRQKYILNNMLEEKMITVQQRDQALNEELHYERFVRKIDQSALYVAEMVRRELYEKYGEDAYTQGFKVYTTVRTDHQKAATEALRKALRNFDRGSSYRGAENYIDLSKSEDVEETVSQYLSGLYTVDKMVPAVVLDVTKKKNVVIQLPGGRRVALDRRALGFAARAVDNEKMGEDRIRRGAVIRVKNNGGRWAVVQEPLLQGALVSLDAKTGAVRALVGGYDFHSKTFNRAVQAMRQPGSTFKPFVYSAALSKGMTASTVVNDAPISLPGKGPNGSVWTPKNSDGRYSGYITLRQALTASKNMVSIRILMSIGVGYAQQYIRRFGFRPSELPASLSMALGTGETTPLKVAEAYSVFANGGYRVSSHVIDKIYDRDGRLRAQMQPLVAGQNAPQAIDPRNAYIMYKIMQDVVRVGTARGAAALGRTDIAGKTGTTNDNKDAWFVGFNPDVVTAVYIGFDKPKSMGRAGYGGTIAVPVWVDYMRFALKGKQGKGMKMPEGVVSSNGEYYMKERMVTDPGLMLDNSGIAPQPSRRAKEDDEAAVENEQQGRSDETRQDVQETPVLPSNTDSKQQQ

SEQ ID NO: 4006 - protein, 805 aa, Neisseria
MVNYYSAMIKKILTTCFGLVFGFCVFGVGLVAIAILVTYPKLPSLDSLQHYQPKMPLTIYSADGEVIGMYGEQRREFTKIGDFPEVLRNAVIAAEDKRFYRHWGVDVWGVARAAVGNVVSGSVQSGASTITQQVAKNFYLSSEKTFTRKFNEVLLAYKIEQSLSKDKILELYFNQIYLGQRAYGFASAAQIYFNKNVRDLTLAEAAMLAGLPKAPSAYNPIVNPERAKLRQKYILNNMLEEKMITVQQRDQALNEELHYERFVRKIDQSALYVAEMVRQELYEKYGEDAYTQGFKVYTTVRADHQKVATEALRKALRNFDRGSSYRGAENYIDLSKSEDVEETVSQYLSGLYTVDKMVPAVVLDVTKKKNVVIQLPGGRRVTLDRRALGFAARAVNNEKMGEDRIRRGAVIRVKNNGGRWAVVQEPLLQGALGSLDAKTGAVRALVGGYDFHSKTFNRAVQAMRQPGSTFKPFVYSAALSKGMTASTVVNDAPISLPGKGPNGSVWTPKNSDGRYSGYITLRQALTASKNMVSIRILMSIGVGYAQQYIRRFGFRSSELPASLSMALGTGETTPLKVAEAYSVFANGGYRVSSHVIDKIYDRDGRLRAQMQPLVAGQNAPQAIDPRNAYIMYKIMQDVVRVGTARGAAALGRTDIAGKTGTTNDNKDAWFVGFNPDVVTAVYIGFDKPKSMGRVGYGGTIAVPVWVDYMRFALKGKQGKGMKMPEGVVSSNGEYYMKERMVTDPGLTLDNSGIAPQPSRRAKEDDGGAAEGGRQAADDEVRQDMQETPVLPSNTGSKQQQLDSLF

SEQ ID NO: 4007 - protein, 805 aa, Neisseria
MVNYYSAMIKKILTTCFGLVFGFCVFGVGLVAIAILVTYPKLPSLDSLQHYQPKMPLTIYSADGEVIGMYGEQRREFTKIGDFPEVLRNAVIAAEDKRFYRHWGVDVWGVARAAVGNVVSGSVQSGASTITQQVAKNFYLSSEKTFTRKFNEVLLAYKIEQSLSKDKILELYFNQIYLGQRAYGFASAAQIYFNKNVRDLTLAEAAMLAGLPKAPSAYNPIVNPERAKLRQKYILNNMLEEKMITVQQRDQALNEELHYERFVRKIDQSALYVAEMVRQELYEKYGEDAYTQGFKVYTTVRADHQKVATEALRKALRNFDRGSSYRGAENYIDLSKSEDVEETVSQYLSGLYTVDKMVPAVVLDVTKKKNVVIQLPGGRRVTLDRRALGFAARAVNNEKMGEDRIRRGAVIRVKNNGGRWAVVQEPLLQGALVSLDAKTGAVRALVGGYDFHSKTFNRAVQAMRQPGSTFKPFVYSAALSKGMTASTVVNDAPISLPGKGPNGSVWTPKNSDGRYSGYITLRQALTASKNMVSIRILMSIGVGYAQQYIRRFGFRSSELPASLSMALGTGETTPLKVAEAYSVFANGGYRVSSHVIDKIYDRDGRLRAQMQPLVAGQNAPQAIDPRNAYIMYKIMQDVVRVGTARGAAALGRTDIAGKTGTTNDNKDAWFVGFNPDVVTAVYIGFDKPKSMGRVGYGGTIAVPVWVDYMRFALKGKQGKGMKMPEGVVSSNGEYYMKERMVTDPGLTLDNSGIAPQPSRRAKEDDGGAAEGGRQAADDEVRQDMQETPVLPSNTGSKQQQLDSLF

SEQ ID NO: 4008 - protein, 254 aa, Neisseria
MFRIVKWLIALPVGIFIFFNAYVYGNIITYRAVAPHRTAFMSMRMKQFEQEGRDVALDYRWVPYNRISTNLKKALIASEDVRFAGHGGFDGDGIQNAIRRNRNSGEVKAGGSTISQQLAKNLFLNESRNYLRKGEEAAITAMMEAVTDKNRIFELYLNSIEWHYGVFGAEAASRYFYKKPAADLTKQQAAKLTVLVPAPFYYSDHPKSKRLRNKTNIVLRRMGSANYPKAKRTDCSRYGNAATGVRTAYVFWDL

SEQ ID NO: 4009 - protein, 233 aa, Neisseria; identical to SEQ ID NO: 939

SEQ ID NO: 4010 - protein, 233 aa, Neisseria
MFRIIKWLIALPVGIFIFFNAYVYGNIITYRAVAPHRTAFMSMRMKQFEQEGRDVALDYRWMPYKRISTNLKKALIASEDARFAGHGGFDWGGIQNAIRRNRNSGKVKAGGSTISQQLAKNLFLNESRSYIRKGEEAAITAMMEAVTDKDRIFELYLNSIEWHYGVFGAEAASRYFYQIPAAKLTKQQAAKLTARVPAPLYYADHPKSKRLRNKTNIVLRRMGSAELPESDTD

SEQ ID NO: 4011 - protein, 582 aa, Neisseria
MLIKSEYKPRMLPKEEQVKKPMTSNGRISFVLMAMAVLFACLIARGLYLQTVTYNFLKEQGDNRIVRTQALPATRGTVSDRNGAVLALSAPTESLFAVPKDMKEMPSAAQLERLSELVDVPVDVLRNKLEQKGKSFIWIKRQLDPKVAEEVKALGLENFVFEKELKRHYPMGNLFAHVIGFTDIDGKGQEGLELSLEDSLYGEDGAEVVLRDRQGNIVDSLDSPRNKAPQNGKDIILSLDQRIQTLAYEELNKAVEYHQAKAGTVVVLDARTGEILALANTPAYDPNRPGRADSEQRRNRAVTDMIEPGSAIKPFVIAKALDAGKTDLNERLNTQPYKIGPSPVRDDTHVYPSLDVRGIMQKSSNVGTSKLSARFGAEEMYDFYHELGIGVRMHSGFPGETAGLLRNWRRWRPIEQATMSFGYGLQLSLLQLARAYTALTHDGVLLPLSFEKQAVAPQGKRIFKESTAREVRNLMVSVTEPGGTGTAGAVDGFDVGAKTGTARKFVNGRYADNKHVATFIGFAPAKNPRVIVAVTIDEPTAHGYYGGVVAGPPFKKIMGGSLNILGISPTKPLTAAAVKTPS

SEQ ID NO: 4012 - protein, 581 aa, Neisseria; identical to SEQ ID NO: 995

SEQ ID NO: 4013 - protein, 581 aa, Neisseria; identical to SEQ ID NO: 995

SEQ ID NO: 4014 - protein, 515 aa, Neisseria
VRFNHFIMVTIIIYVISPANKPVRRPGVPTYPALPYNCFFYVTDSPMNFPKTAASLLLLLASLAAHALDTGRIPQNEIAVYVQELDSGKVIIDHRAGIPVNPASTMKLVTAFAAFKTFGSNYRWATEFKSNGTVNDGTLDGNLYWAGSGDPVFNQENLLAVQRQLRDKGIRNITGRLMLDHSLWGEVGSPDHFEADSGSPFMTPPNPTMLSAGMVMVRAERNAAGSTDILTDPPLPHIFAQNNLKITASQAACPSVKKLMRASFSGNTLKLRGNIPESCLGKPVGVRMFALDELIRQSFTNRWLLGGGRISDGIGIADTPEGAQTLAVAHSKPMKEILTDMNKRSDNLIARSVFLKLGGDGKLPAVSEQAASAVRRELAVSGIDVADLVLENGSGLSRKERVTARMMAQMLETAYFSPFAQDFIDTLPIAGTDGTLRNRFKQSGGLLRLKTGTLNNVRALAGYWLGDKPMAVVVIINSGRAVSLLPDLDNFVAKNIISGGDGWLDAKLMCKERRA

SEQ ID NO: 4015 - protein, 515 aa, Neisseria
VRLNHFIMIAIIIYVISPANKPARRHSVPTYPALPYNCFFYVTDLPMNFPKTAASLLLLLASLAAHALDTGRIPQNEIAVYVQELDSGKVIIDHRSDVPVNPASTMKLVTAFAAFKTFGSNYRWATEFKSNGTVNDGTLDGNLYWAGSGDPVFNQENLLDAQKQLREQGILNITGHLMLDHSLWGEVGSPDDFEADSGSPFMTPPNPTMLSAGMVMVRAERNAAGSTDILTDPPLPHIFAQNNLKITASQAACPSIKKLMRASFSDNTLKLRGNIPESCLGKPVGVRMFALDELIRQSFTNHWLLGGGRISDGIGIADTPEGAQTLAVAHAKPMKEILTDMNKRSDNLIARSVFLKLGGDGKLPAVSEQAASAVRRELAVSGIDVADLVLENGSGLSRKERVTARMMAQMLETAYFSPFAQDFIDTLPIAGTDGTLRNRFKQSGGLLRLKTGTLNNVRALAGYWLGDKPMAVVVIINSGRAVSLLPDLDNFVANNIISGGDGWLDAKLMCKERRA

SEQ ID NO: 4016 - protein, 515 aa, Neisseria
VRLNHFIMIAIIIYVISPANKPARRHSVPTYPALPYNCFFYVTDLPMNFPKTAASLLLLLASLAAHALDTGRIPQNEIAVYVQELDSGKVIIDHRSDVPVNPASTMKLVTAFAAFKTFGSNYRWATEFKSNGTVNDGTLDGNLYWAGSGDPVFNQENLLAVQRQLREQGIRNITGHLMLDHSLWGEVGSPDDFEADSGSPFMTPPNPTMLSAGMVMVRAERNAADSTDILTDPPLPHIFAQNNLKITASQAACPSIKKLMRASFSDNTLKLRGNIPESCLGKPVGVRMFALDELIRQSFTNHWLLGGGRISDGIGISDTPEGAQTLAVAHSKPMKEILTDMNKRSDNLIARSVFLKLGGDGKLPAVSEQAASAVRRELAVSGIDVADLVLENGSGLSRKERVTARMMAQMLETAYFSPFAQDFIDTLPIAGTDGTLRNRFKQSGGLLRLKTGTLNNVRALAGYWLGDKPMAVVVIINSGRAVSLLPDLDNFVANNIISGGDGWLDAKLMCKERRA

SEQ ID NO: 4017 - protein, 390 aa, Neisseria
MPSEMPSETWQAEVRTALGLFQRADADRIAYFIQQFARFFARFLRACLQNLFDLRRIRGQCVVAFAQFCQFGVDFRRRKFFRLAPSQAVGKHLRKFRRFRRRGEGFIDFKQRAFVGLFRLARLFHVGNDFVDRFLGFFVVFPKRNGIAVGFGHFASVQTDQEFDVFVDFHFGQGEEFLETVGEAAGNVARHFDVLDLVAPDGDFVGVEHQNVGSHQNRITEQTHFHTEIGVFLPVFRIGLNGGFVGVGAVHQTLGGDAGQNPVQLHHFGNVALAVEGGALGVESAGKPSGGNGLGGLVNHLLLVAFDDAVVIGEEEEGFGIGVLRRADGGADGADVVAQMRGAGGGYAGQNSFFAHKNVLTAAMPSEREKDAPIIPDLPHTSSRQQTFPY

SEQ ID NO: 4018 - protein, 385 aa, Neisseria
  VARIANT (1)...(385): Xaa = Any Amino Acid
MPSETRQAEVRTASGSFQRADADRIXYFVQFACFFTRFRRACLQNLFDLRRVGGQLVVAFARFGEFGVDFRRQKFFGFTPRQAVGKHFRKFHRFRRRGEGFVDFKQWAFVGLFRLARLFHIGDDFVDRFLGFFVVFPKRNGVAVGFGHFASVQTDQEFDVFIDFHFGQGEEFPEAVVEAAGDVARHFDVLDLVAPDGHFVGVEHQNIGSHQNRITEQTHFHTEIRVFLPVFCICLHGGFVGMGAVHQTLGSDAGQNPVQFHHFGSVALAVEGGALGVESAGKPSGGNGLGGLVNHLRLVAFDDTVVIGEEEEGFGIEVLRRADGGADGADVVAQMRDAGGGYAGQNSFFAHKNVLAASMPSEREKDVPIIPDLPPTSSRQQTFPY

SEQ ID NO: 4019 - protein, 377 aa, Neisseria
EVRTALGLFQRADTDRITYFAQFACFFTRFLRACLQNLFDLRRVGGQLVVAFARFGEFGVDFRRQKFFCLAPSQAVGKHFRKFCRFRRRGESFVDFKQRAFVGLLRLARLFHIGDDFVDRFLGFFVVFPKRNGVAVGFGHFASVQTNQEFDVFVDFHFGQCEEFPEAVVEAAGNIACHFNVLDLVATDWNFMGIEHENVGSHEDRVAVQTHFHAEIGVFLPVFRICLHGGFVGVGAVHQTLGGDAGQNPVQFHHFGNVALTVEGGALGVESAGKPSGGNGLGGLVNHLRLVAFDDTVVIGEEEEGFGIRVLRRADGGADSTDVVAQMRDAGGGYAGQNSFFAHKNVLAASMPSEREKDAPIIPDLPPTSSRQQTFPY

SEQ ID NO: 4020 - protein, 269 aa, Neisseria
  VARIANT (1)...(269): Xaa = Any Amino Acid
MPDFSMSNLAVAFSITLAAGLFTVLXSGLVMFSKTPNPRVLSFGLAFAGGAMVYVSLTEIFSKSSEAFAEIYDKDHAFAAATMAFLAGMGGIALIDRLVPNPHETLDAQDPSFQESKRRHIARVGMMAAFAITAHNFPEGLATFFATLENPAVGMPLALAIAIHNIPEGISIAAPVYFATRSRKKTVWACLLSGLAEPLGAALGYLVLQPFLSPAVFGSVFGVIAGVMVFLALDELXPAAKRYSDGHETVYGLTTGMAVIAVSLVLFHF

SEQ ID NO: 4021 - protein, 269 aa, Neisseria
MPDFSMSNLAVAFSITLAAGLFTVLGSGLVMFSKTPNPRVLSFGLAFAGGAMVYVSLTEIFSKSSEAFAEIYDKDHAFAAATMAFLAGMGGIALIDRLVPNPHETLDAQDPSFQESKRRHIARVGMMAAFAITAHNFPEGLATFFATLENPAVGMPLALAIAIHNIPEGISIAAPVYFATRSRKKTVWACLLSGLAEPLGAALGYLVLQPFLSPAVFGSVFGVIAGVMVFLALDELLPAAKRYSDGHETVYGLTMGMAVIAVSLVLFHF

SEQ ID NO: 4022 - protein, 361 aa, Neisseria
MPSEPERRHGNTALPFPIAARPTVGFSGKPFKITGKCVVLRRRIVQAVDFTPRLFAVGHFADVPAYVFACDAHTDGLTIKRVHGADVVQNGGSAFCQTQGRRNAVFGIMLQIAEKPRPALRAAPYHDAVGGGLFEDGGGFLRRSDVAVDPGRDVQTAFGLGDEFVTRLAFVHLRARAPVNGKGGNAAIFGDFGDGGQVLIVVVPTQTGFEGNGYARRLDHRLQNGGNQRLVLHQRATGLDVAHFLGGAAHIDVDDLRPESDVVTRRIRHLFGVAAGNLHGNDAAFIGKITAVQGFSGIPERRIAGQHFAHRPTCAKRPTEAAEGFVGNARHRRKCDGVVDKITADVHNGPAFQKSAPLYIF

SEQ ID NO: 4023 - protein, 360 aa, Neisseria
LHFQRIIKCSEGIWAVGARPTVGFFGKSFKITCKHVVLRRRTVQAVDFTTCLFAVGHFVDVPAYVFACDAHTGGVAVKRVYGADVVQNSGGAFCQTQGRRQNTVFGIMFQIAEEPRPALRAAPYHNAVGGGLFEDGLGFLRRSNVAVDPDRDVQTAFGFGDEFVTRFAFVHLRTRASVDGKGGDAAIFGDFGDDGQVLMVVVPTQTGFEGNGYACRTDDGFQNGGNQRLVLHQRATGLDIADFFSGTAHVDVDKLRPKADVVTRGIRHLLRIASGNLHGNNAAFIGKIAAVQGFSSISERRVAGQHFAHRPTCAKISAKSAERFVGNARHRRKCDGVVDKIAADVHNGSAFQKSTPLYIF

SEQ ID NO: 4024 - protein, 359 aa, Neisseria
LHFQRIIKCSEGIWAVGARPTVGFFGKSFKITCKHVVLRRRTVQAVDFTTCLFAVGHFVDVPAYVFACDAHTGGVAVKRVHGSDVVQNSGGTFCQTQGRRNTVFGVMFQIAEEPRSALRAAPYHNAVCGGLFEDGLGFLRRGNVAVDPDRDVQTAFGFGNQVVSRFAFVHLRARASVDGKGGNAAIFGDFGDDGQVLMVVVPTQTGFEGNGYARRFDHRLQNGGNQRLVLHQRATGLDIADFFSGTAHVDVDKLRPKADVVTRGIRHLLRIASGNLHGNNAAFIGKIAAVQGFSSISERRVAGQHFAHRPTCAKISAKSAERFVGNARHRRKCDGVVDKIAADVHNGSAFQKSTPLYIF

SEQ ID NO: 4025 - protein, 525 aa, Neisseria
  VARIANT (1)...(525): Xaa = Any Amino Acid
MATQVGGANSDEASPCFPISEVELVGEETAKFRFALNHALCQTHFVSGKCLHAGDINQIMSLAQNALIGRGYTTTRILAAPQDLNSGKLQLTLMPGYLRSIRIDRSNDDQTHAGRIAAFQNKFPTRSNDLLNLRDLEQGLENLKCLPTAEADLQIVPVEREPNQSDVVVQWRXRLLPYCVSVGMDNSGSEATGKYQGNITFSADNPFGLSDMFYVNYGRSIGGTPDEENFDGHRKEGGSNNYAVHYSAPFGKWTWAFNHNGYRYHQAVSGLSEVYDYNGKSYNTDFGFNRLLYRDAKRKTYLSVKLWTRETKSYIDDAELTVQRRKTTGWLAELSHKGYIGRSTADFKLKYKHGTGMKDALRAPEEAFGEGTSRMKIWTASADVNTPFQIGKQLFAYDTSVHAQWNKTPLTSQDKLAIGGHHTVRGFDGEMSLPAERGWYWRNDLSWQFKPGHQLYLGADVGHVSGQSAKWLSGQTLAGTAIGIRGQIKLGGNLHYDIFTGRALKKPEYFQTKKWVTGFQVGYSF

SEQ ID NO: 4026 - protein, 547 aa, Neisseria
  VARIANT (1)...(547): Xaa = Any Amino Acid
MQRQQHIDAELLTDANVRFEQPLEKNNYVLSEDETPCTRVNYISLDDKTVRKFSFLPSVLMKETAFKTGMCLGSNNLSRLQKAAQQILIVRGYLTSQAIIQPQNMDSGILKLRVSAGEIGDIRYEEKRDGKSAEGSISAFNNKFPLYRNKILNLRDVEQGLENLRRLPSVKTDIQIIPSEEEGKSDLQIKWQQNKPIRFSIGIDDAGGKTTGKYQGNVALSFDNPLGLSDLFYVSYGRGLAHKTDLTDATGTETESGSRSYSVHYSVPVKKWLFSFNHNGHRYHEATEGYSVNYDYNGKQYQSSLAAERMLWRNRLHKTSVGMKLWTRQTYKYIDDAEIEVQRRRSAGWEAELRHRAYLNRWQLDGKLSYKRGTGMRQSMPAPEENGGDILPGTSRMKIITASLDAAAPFXLGKQQFFYATAIQAQWNKTPLVAQDKLSIGSRYTVRGFDGEQSLFGERGFYWQNTLTWYFHPNHQFYLGADYGRVSGESAQYVSGKQLMGAVVGFRGGHKVGGMFAYDLFAGKPLHKPKGFQTTNTVYGFNLNYSF

SEQ ID NO: 4027 - protein, 547 aa, Neisseria
  VARIANT (1)...(547): Xaa = Any Amino Acid
MQRQQHIDAELLTDANVRFEQPLEKNNYVLSEDETPCTRVNYISLDDKTARKFSFLPSVLMKETAFKTGMCLGSNNLSRLQKAAQQILIVRGYLTSQAIIQPQNMDSGILKLRVSAGEIGDIRYEEKRDGKSAEGSISAFNNKFPLYRNKILNLRDVEQGLENLRRLPSVKTDIQIIPSEEEGKSDLQIKWQQNKPIRFSIGIDDAGGKTTGKYQGNVALSFDNPLGLSDLFYVSYGRGLVHKTDLTDATGTETESGSRSYSVHYSVPVKKWLFSFNHNGHRYHEATEGYSVNYDYNGKQYQSSLAAERMLWRNRFHKTSVGMKLWTRQTYKYIDDAEIEVQRRRSAGWEAELRHRAYLNRWQLDGKLSYKRGTGMRQSMPAPEENGGGTIPGTSRMKIITAGLDAAAPFMLGKQQFFYATAIQAQWNKTPLVAQDKLSIGSRYTVXGFDGEQSLFGERGFYWQNTLTWYFHPNHQFYLGADYGRVSGESAQYVSGKQLMGAVVGFRGGHKVGGMFAYDLFAGKPLHKPKGFQTTNTVYGFNLNYSF

SEQ ID NO: 4028 - protein, 436 aa, Neisseria
MMQHNRFFAVGAGGDDGDRRAADFFNPFQICFGIGRQCVVAFHADSRFAPAGHGFVNRFAGFHRIRTARQDVGFAAAWQFVADADIDGFNAVHYIEFGNAHTGNAVDLDGAFQGGGIKPAAAARAAGYRTEFVSALRQTCAYFVEQFGRERARTDARGIGFDDAQNIIQHLRTYARACRSRAGETVGRGNEGVSAVVDVQQRTLRAFKQQFFAVFVFFVQHAGHVGNHRRNARRDFFDNRHHVFRFNRSGVMQVLELDVVIGKDGIQFFTQFFRMQQIGGANGAACHFVFVGRADAAAGRADFAFAARCFAGLVERDVVRQDQRAGRRDFQTAFDVFHACRVQLVDFAQQGFGGNDNARTDEAIQSFVQDTARNQAQNGFFAADDQGMARIVAALEAHDAAGFFRQPVNDFTFTLVAPLCADYYNIFSHSHITYRY

SEQ ID NO: 4029 - protein, 436 aa, Neisseria
  VARIANT (1)...(436): Xaa = Any Amino Acid
MMQHNRFFSVGAGGDDGDRRAADFFNPFQICFGVFGQCAVVLHAESGFAPAGHGFVNRLAGFHRIGTARQDVGFAAVGQFIADADIDGFNAVHYIEFSNTHTGNAVDLDGAFQGGGIKPAAAACASGYRTEFVSAFCQTYAYFVEQFGRERARTDARGIGFDDAQNIIQHLRTYARACRSCARQTVGRGNEGISAVVDVQQRTLRAFKQQFFAVFVFLVQHAGHVGNHRRNARRDFFDNRHHVFRFNRLGIVQMLQLDIVIGKDGIQFFTQFXRMQQIGGANGAACHFVFVGRADAAAGRADFAFAAXIFAGLVERDVVRQDQRAGRRDFQTAFDVFHACRVQLVDFAQQGFGGDDNARTDEAVQTFMQDAARNQAQNGFFAADNQGMARIVAALEAHHAAGFFRQPVNDFTFTLVAPLCADXYNIFSHSHITYRY

SEQ ID NO: 4030 - protein, 435 aa, Neisseria
  VARIANT (1)...(435): Xaa = Any Amino Acid
MMQHNRFFAVGAGGDDGDRRTADFFNPFQICFGIGRCVVAFHAESGFAPTGHGFVNRLAGFYRIRAARQDVGFAAVGQFVADADIDGFNAVHYIEFGNTHTGNAVDLDGAFQGGGIKPAAAACASGYRTEFVSAFCQTCSDFVEQFGRERARTDARGIGFDDAQNIIQHLRAYARACRSRAGEAVGRSNEGVSAVVDVQQRTLRAFKQQFFAVFVFFVQHAGHVGNHRRNARRDFFDNRHHVFRFHRLGIVQMLQLDVVISKDGIQFFTQFFRMQQIGGANGAACHFVFVGRADAAAGRADFAFAARCFSGLVERDVIRQDQRAGRRDFQTAFDVFHACRVQLVDFAQQGFGGDDNARTDEAVQTFMQDAARNQAQNGFFAADNQGMTRIVAALEAHHASGFFRQPVNDFTFTLVAPLCADYYNIFSHSHITXRY

SEQ ID NO: 4031 - protein, 112 aa, Neisseria; identical to SEQ ID NO: 1768

SEQ ID NO: 4032 - protein, 126 aa, Neisseria
MKKPTDTLPVNLQRRRLLCAAGALLISPLAHAGAQREETLADDVASVMRSSVGSVNPPRLVFDNPKEGERWLSAMSARLARFVPDEGERRRLLVNIQYESSRAGLDTQIVLGLIEVESGYRARIIS

SEQ ID NO: 4033 - protein, 207 aa, Neisseria
  VARIANT (1)...(207): Xaa = Any Amino Acid
MRKPTDTLPVNLQRRRLLCAAGALLLSPLAHAGAQREETLADDVASVMRSSVGSVNPPRLVFDNPKEGERWLSAMSARLARFVPEEEERRRLLVNIQYESSRAGLDTQIVLGLIEVESAFRQYAISGVGARGLMQVMPXWKNYIGKPAHNLFDIRTNLRYGCTILRHYRNLEKGNIVRALARFNGSLGSNKYPNAVLGAWRNRWQWR

SEQ ID NO: 4034 - protein, 207 aa, Neisseria
MKKPTDTLPVNLQRRRLLCAAGALLLSPLAQAGAQREETLADDVASVMRSSVGSINPPRLVFDNPKEGERWLSAMSARLARFVPDEEERRRLLVNIQYESSRAGLDTQIVLGLIEVESAFRQYAISGVGARGLMQVMPFWKNYIGKPAHNLFDIRTNLRYGCTILRHYRNLEKGNIVRALARFNGSLGSNKYPNAVLGAWRNRWQWR

SEQ ID NO: 4035 - protein, 165 aa, Neisseria
  VARIANT (1)...(165): Xaa = Any Amino Acid
MXKSRLSRYKQNKLIGLFVAGVTARTAAELVGINKNTAAYDFHRLRLIYQNGPHLEMFDGEVEADESYFGGQRKGKRGRGAAGKVAVFGLLKRNGKVYTVTVPNTQTATLFPIIREQVKPDSIVYTDCYRSYDVLDVSEFSHFSFAETSFSYQSQHTFCRTTKPY

SEQ ID NO: 4036 - protein, 166 aa, Neisseria
  VARIANT (1)...(166): Xaa = Any Amino Acid
MRKSRLSQYKQXKLIELFVTGVTARTAAELVGVNKNTAAYYFHRLRLLIYQNSPHLEMFDGEVEADESYFGGQRKGKRGRGAAGKVAVFGLLKRNGKVYTVTVPNTQTATLFPIIREQVKPDSIFYTDCYRSYDVLDVREFSHFSFAETSFSYQSQHTFCRTTKPY

SEQ ID NO: 4037 - protein, 166 aa, Neisseria
MRKSRLSQYKQNKLIELFVAGVTARTAAELVGVNKNTAAYYFHRLRLLIYQNSPHLEMFDGEVEADESYFGGQRKGKRGRGAAGKVAVFGLLKRNGKVYTVTVPNTQTATLFPIIREQVKPDSIVYTDCYRSYDVLDVREFSHFSFAETSFSYQSQHTFCRTTKPY

SEQ ID NO: 4038 - protein, 109 aa, Neisseria
MRKTVLILTISAALLSGCTWETYQDGSGKTAVRAKCSTGTPLCWQDGRGSKKVDCDEYGGERRAVLRNQKRGKPATRRAATLGKPSFRARDGGGRVNRAETGEGKRSAR

SEQ ID NO: 4039 - protein, 90 aa, Neisseria; identical to SEQ ID NO: 640

SEQ ID NO: 4040 - protein, 90 aa, Neisseria
MRKTFLILMTAAALLSGCAWETYQDGNGKTAVRQKYPAGTPVYYQDGSYSKNMNYNQYRPERHAVLPNQTGNNADEEHRQHWQKPKFQNR

SEQ ID NO: 4041 - protein, 94 aa, Neisseria
MKKLLLAAVVSLNAATAFAGDSAERQIYGDPHFEQNRTKAVKMLEQRGYQVYDVDADDYWGKPVLEVEAYKDGREYDIVLSYPDLKIIKEQLDR

SEQ ID NO: 4042 - protein, 94 aa, Neisseria; identical to SEQ ID NO: 1047

SEQ ID NO: 4043 - protein, 94 aa, Neisseria
MKKLLLVAVVSLSAATAFAGDSAERQIYGDPYFEQNRTKAVKMLEQRGYQVHDVDADDHWGKPVLEVEAYKDGREYDIVLSYPDLKIIKEQLDR

SEQ ID NO: 4044 - protein, 164 aa, Neisseria
MKKNILEFWVGLFVLIGAAAVAFLAFRVAGGAAFGGSDKTYAVYADFGDIGGLKVNAPVKSAGVLVGRVGAIGLDPKSYQARVRLDLDGKYQFSSDVSAQILTSGLLGEQYIGLQQGGDTENLAAGDTISVTSSAMVLENLIGKFMTSFAEKNAEGGNAEKAAE

SEQ ID NO: 4045 - protein, 164 aa, Neisseria; identical to SEQ ID NO: 532

SEQ ID NO: 4046 - protein, 164 aa, Neisseria; identical to SEQ ID NO: 532

SEQ ID NO: 4047 - protein, 196 aa, Neisseria; identical to SEQ ID NO: 176

SEQ ID NO: 4048 - protein, 196 aa, Neisseria; identical to SEQ ID NO: 174

SEQ ID NO: 4049 - protein, 196 aa, Neisseria; identical to SEQ ID NO: 175

SEQ ID NO: 4050 - protein, 277 aa, Neisseria
MKKTAYAILLLIGFASAPAFAETRPADPYEGYNRAVSKFNDQADRYIFAPAARGYRKVTPKPVRAGVSNFFNNLRDVVSFGSNILRLDIKRASEDLVRVGINTTFGLGGLIDIAGAGGVPDNKNTLGDTFASWGWKNSNYFVLPVLGPSTVRDALGTGITSVYPPKNIVFHTPAGRWGTTAAAAVSTREGLLDLTDSLDEAAIDKYSYTRDLYMKVRARQTGATPAEGTEDNIDIDIDELVESAETGAAEPAVHEDSVSETQAEAAGEAETQPGTQP

SEQ ID NO: 4051 - protein, 275 aa, Neisseria; identical to SEQ ID NO: 2479

SEQ ID NO: 4052 - protein, 279 aa, Neisseria
MKKTAYAFLLLIGFASAPAFAETRPADPYEGYNRAVFKFNDQADRYIFAPAARGYRKVAPKPVRAGVSNFFNNLCDVVSFGSNILRLDIKRASEDLVRVGINTTFGLGGLIDIAGAGGIPDNKNTLGDTFASWGWKNSNYFVLPVLGPSTVRDALGTGITSVYSPKNIVFRTPVGRWGTTAVSAVSTREGLLDLTDSLDEAAIDKYSYTRDLYMKVRARQTGATPAEGTEDNIDIDELVESAETGAAETAVQEDSVSETQAEAAGEAETQPGTQPGTQP

SEQ ID NO: 4053 - protein, 240 aa, Neisseria
MKKCILGILTACAAMPAFADRISDLEARLAQLEHRVAVLESGGNTVKIDLFGSNSTMYVCSVTPFQKTFEASDRNEGVARQKVRQACNRETSAMFCGDEAIRCRKFDCIGWTDKETDTELGFRLCFSLPDFPCIGFQTALECQSCSADSASTIFCTRGCRTTSSPVKVWKYSPATPCSFSRASFNPDLMFLGRSIWLVSPVMTAFAPKPMRVRNIFICSGVVFCASSRMMYAPLSVLPRI

SEQ ID NO: 4054 - protein, 244 aa, Neisseria
  VARIANT (1)...(244): Xaa = Any Amino Acid
MKKCILGILTACAAMPAFADRIGDLEARLAQLEHRVAVLESGGNTVKIDLFGSNSTMYVCSVTPFQKTFEASDRNEGVARQKVRQACNRETSAMFCEDEAIRCRKFDXCIGWTDKETDTDTELGFRICFSLPDFPCIGFQTALECQSCSADSXASTIFCTKGCRTTSSPVKVWKYSPSTLCSFSRASFNPDLMFLGRSIWLVSPVMTAFAPKPMRVRNIFICSGVVFCASSRMMYAPLSVLPRI

SEQ ID NO: 4055 - protein, 240 aa, Neisseria
MKKCILGILTACAAMPAFADRIGDLEARLAQLEHRVAVLESGSNTVKIDLFGSNSTMYVCSVTPFQKTFEASDRNEGVARQKVRQACNRETSAMFCEDEAIRCRKFDCIGWTDKETDTELGFRICFSLPDFPCIGFQTALECQSCSADSASTIFCTKGCRTTSSPVKVWKYSPSTPCSFSRASFNPDLMFLGRSIWLVSPVMTAFAPKPMRVRNIFICSGVVFCASSRMMYAPLSVLPRI

SEQ ID NO: 4056 - protein, 164 aa, Neisseria; identical to SEQ ID NO: 3660

SEQ ID NO: 4057 - protein, 164 aa, Neisseria
  VARIANT (1)...(164): Xaa = Any Amino Acid
MKKTLLAIVAVSALSXCRQAEEGPPPLPRQISDRSVGHYCSMNLTEHNGPKAQIFLNGKPDQPVWFSTIKQMFGYTKLPEEPKGIRVIYVTDMGNVTDWTNPNADTEWMDAKKAFYVIDSGFIGGMGAEDALPFGNKEQAEKFAKDKGGKVVGFDDMPDTYIFK

SEQ ID NO: 4058 - protein, 164 aa, Neisseria; identical to SEQ ID NO: 1157

SEQ ID NO: 4059 - protein, 376 aa, Neisseria
MVKHLPLAVLTALLLAACGGSDKPPAEKPAPAENQNVLKIYNWSEYVDPETVADFEKKNGIKVTYDVYDSDETLESKVLTGKSGYDIVAPSNAFVGRQIKAGAYQKIDKSMIPNYKHLNPEMMRLMDGVDPDHEYAVPFYWGTNTFAINTERVKKALGTDKLPDNQWDLVFNPEYTFKLKQCGISYLDSAAEIYPMVLNYLGKNPNSSNTEDIREATALLKKNRPNIKRFTSSGFIDDLARGDTCVTIGFGGDLNIAKRRAEEAGGKEKIRVMMPKEGVGIWVDSFVIPKDAKNVANAHKYINDFLDPEVSAKNGNFVTYAPSSKPARDLMEDEFKNDNTIFPSGEDLKNSFIMVPIRPAALKFMVRQWQDVKAGK

SEQ ID NO: 4060 - protein, 376 aa, Neisseria; identical to SEQ ID NO: 2129

SEQ ID NO: 4061 - protein, 376 aa, Neisseria
MTKHLPLAVLTALLLAACGGSDKPPAEKPAPAENRNVLKIYNWSEYVDPETVADFEKKNGIKVTYDVYDSDETLESKVLTGKSGYDIVAPSNAFVGRQIKAGAYQKIDKSLIPNYKHLNPEMMRLMDGVDPGHEYAVPFYWGTNTFAINTERVKKALGTDKLPDNQWDLVFDPEYTSKLKQCGISYLDSAAEIYPMVLNYLGKNPNSSNTEDIREATALLKKNRPNIKRFTSSGFIDDLARGDTCVTIGFGGDLNIAKRRAEEAGGKEKIRVMMPKEGVGIWVDSFVIPKDAKNVANAHKYINDFLDPEVSAKNGNFVTYAPSSKPARELMEDEFKNDNTIFPTEEDLKNSFIMVPIQPAALKFMVRQWQDVKAGK

SEQ ID NO: 4062 - protein, 441 aa, Neisseria
MKKHLLRSALYGIAAAILAACQSRSIQTFPQPDTSVINGPDRPAGIPDPAGTTVAGGGAVYTVVPHLSMPHWAAQDFAKSLQSFRLGCANLKNRQGWQDVCAQAFQTPVHSFQAKRFFERYFTPWQVAGNGSLAGTVTGYYEPVLKGDGRRTERARFPIYGIPDDFISVPLPAGLRGGKNLVRIRQTGKNSGTIDNAGGTHTADLSRFPITARTTAIKGRFEGSRFLPYHTRNQINGGALDGKAPILGYAEDPVELFFMHIQGSGRLKTPSGKYIRIGYADKNEHPYVSIGRYMADKGYLKLGQTSMQGIKAYMRQNPQRLAEVLGQNPSYIFFRELAGSGNEGPVGALGTPLMGEYAGAIDRHYITLGAPLFVATAHPVTRKALNRLIMAQDTGSAIKGAVRVDYFWGYGDEAGELAGKQKTTGYVWQLLPNGMKPEYRP

SEQ ID NO: 4063 - protein, 441 aa, Neisseria; identical to SEQ ID NO: 634

SEQ ID NO: 4064 - protein, 441 aa, Neisseria
MKKYLFRAALCGIAAAILAACQSKSIQTFPQPDTSVINGPDRPVGIPDPAGTTVGGGGAVYTVVPHLSLPHWAAQDFAKSLQSFRLGCANLKNRQGWQDVCAQAFQTPVHSVQAKQFFERYFTPWQVAGNGSLAGTVTGYYEPVLKGDDRRTAQARFPIYGIPDDFISVPLPAGLRSGKALVRIRQTGKNSGTIDNTGGTHTADLSQFPITARTTAIKGRFEGSRFLPYHTRNQINGGALDGKAPILGYAEDPVELFFMHIQGSGRLKTPSGKYIRIGYADKNEHPYVSIGRYMADKGYLKLGQTSMQGIKAYMQQNPQRLAEVLGQNPSYIFFRELTGSSNDGPVGALGTPLMGEYAGAVDRHYITLGAPLFVATAHPVTRKALNRLIMAQDTGSAIKGAVRVDYFWGYGDEAGELAGKQKTTGYVWQLLPNGMKPEYRP

SEQ ID NO: 4065 - protein, 207 aa, Neisseria
  VARIANT (1)...(207): Xaa = Any Amino Acid
PMQLVTEKGKENMIQRGTYNYQYRSNRPVKDGSYLVTAEYQPTFRSKNKAGWKQAGIKEMPDASYCEQTRMFGKNIVNVGHESADTAIITKPVGQNLEIVPLDNPADIHVGXRFKVRVLFRGEPLPNATVTATFDGFDTSDRSKTHKTEAQAFSDTTDGEGEVDIIPLRQGFWKASVEYKADFPDQSLCRKQANYTTLTFQIAHSHH

SEQ ID NO: 4066 - protein, 268 aa, Neisseria
  VARIANT (1)...(268): Xaa = Any Amino Acid
MKKTLTLLSVSALFATSAHAHRVWVETAHTHGGEYLKADLGYGEFPELEPIAKDRLHIFSKPMQLVTEKGKENMIQRGTYNYQYRSNRPVKDGSYLVIAEYQPTFWSKXKAGWKQAGIKEMPDASYCEQTRMFGKNIVNVGHESADTAIITKPVGQNLEIVPLDNPANIHVGERFKVRVLFRGEPLPNATVTATFDGFDTSDRSKTHXXEAQAFSDSTDDKGEVDIIXLRQGFWKANVEHKTDFPDQSVCQKQANYSTLTFQIGHSHH

SEQ ID NO: 4067 - protein, 267 aa, Neisseria
KKTLTLLAVSALFAASAHAHRVWVETAHTHGGEYLKADLGYGEFPELEPIAKDRLHIFSKPMQLVTEKGKENMIQRGTYNYQYRSNRPVKDGSYLVIAEYQPTFWSKNKAGWKQAGIKQMPDASYCEQTRMFGKNIVNVGHESADTAIITKPVGQNLEIVPLDNPANIHVGERFKVRVLFRGEPLPNATVTATFDGFDTSDRSKTHKTEAQAFSDSTDDKGEVDIIPLRQGFWKANVEHKADFPDQSVCQKQANYSTLTFQIGHSHH

SEQ ID NO: 4068 - protein, 268 aa, Neisseria
MKKTLTLLAVSALFATSAHPHRVWVETAHTHGGEYLKADLGYGEFPELEPIAKDRLHIFSKPMQLVTEKGKENMIQRGTYNYQYRSNRPVKDGSYLVTAEYQPTFRSKNKAGWKQAGIKEMPDASYCEQTRMFGKNIVNVGHESADTAIITKPVGQNLEIVPLDNPANIHVGERFKVRVLFRGEPLPNATVTATFDGFDTSDRSKTHKTEAQAFSDTTDGKGEVDIIPLRQGFWKASVEYKADFPDQSLCQKQANYTTLTFQIGHSHH

SEQ ID NO: 4069 - protein, 268 aa, Neisseria; identical to SEQ ID NO: 2014

SEQ ID NO: 4070 - protein, 267 aa, Neisseria; identical to SEQ ID NO: 4067

SEQ ID NO: 4071 - protein, 162 aa, Neisseria
MKKYLIPLSIAAVLSGCQSIYVPTLTEIPVNPINTVKTEAPAKGFRLAPSHWADVAKISDEATRLGYQVGIGKMTKVQAAQYLNNFRKRLVGRNAVDDSMYEIYLRSAVDSQRGEINTEQSKLYIENALRGWQQRWKNMDAKPDNPAFTNFLMEVMKMQPLK

SEQ ID NO: 4072 - protein, 162 aa, Neisseria; identical to SEQ ID NO: 2127

SEQ ID NO: 4073 - protein, 162 aa, Neisseria
MKKYLIPLSIVAVLSGCQSIYVPTLTEIPVNPINTVKTEAPAKGFRLASSHWTDVAKISDEATRLGYQVGIGKMTKVQAAQYLNNFRKRLVGRNAVDDSMYEIYLRSAIDSQRGAINTEQSKLYIQNALRGWQQRWKNMDVKPNNPAFTNFLMEVMKMQPLK

SEQ ID NO: 4074 - protein, 363 aa, Neisseria
MEKRKILPLAICLAALSACTAMEARTPRANEAQAPRADEMKKESRPAFDAAAVPVSDSGFAANANVRRFVDDEVGKGDFSQAEWQDFFDKAAYKADIVKIMHRPSTSRPWYVFRTGNSGRAKFHGARRFYAENRAVIDDVAQKYGVPAELIVAIIGIETNYGKNTGSFRVADALATLGFDYPRRAGFFQKELVELLKLAKEEGGDVFAFKGSYAGAMGMPQFMPSSYRKWAVDYDGDGHRDIWGNVGDVAASVANYMKQHGWRTGGKMLVSATLAPGADVQAIIGEKTALTRTVADLKAYGIIPGETLADDEKAVLFKLETAPGVFEYYLGLNNFYTVWQYNHSRMYVTAVRDIANSLGGPGL

SEQ ID NO: 4075 - protein, 369 aa, Neisseria; identical to SEQ ID NO: 1828

SEQ ID NO: 4076 - protein, 369 aa, Neisseria
MKNRKILPLAICLAALSACTAMEARPPRANEAQAPRADEMKKESRPAFDAAAVFDAAAVPVSDSGFAANANVRRFVDDEVGKGDFSRAEWQDFFDKAAYKADIVKIMHRPSTSRPWYVFRTGNSGKAKFRGARRFYAENRALIDDVAQKYGVPAELIVAVIGIETNYGKNTGSFRVADALATLGFDYPRRAGFFQKELVELLKLAKEEGGDVFAFKGSYAGAMGMPQFMPSSYRKWAVDYDGDGHRDIWGNVGDVAASIANYMKQHGWRTGGKILVSATLAPGADVQAIIGEKTALTRTVADLKAYGIIPGEELADDEKAVLFKLETAPGVFEYYLGLNNFYTVWQYNHSRMYVTAVRDIANSLGGPGL

SEQ ID NO: 4077 - protein, 123 aa, Neisseria
MKRQAFFKPMACAAFLSAVSLRLPVLGACYAILSLYAFALYGIDKRRAVRGKRRIPEHRLLLPALFGGWTGAYLGSRMFRHKTAKKRFVVLFRLTVSGNVLATCILIDYFVPPELFVKLGQHL

SEQ ID NO: 4078 - protein, 157 aa, Neisseria
  VARIANT (1)...(157): Xaa = Any Amino Acid
MKRQAFFKLMACAAFLSAVSLRLPVLGACYAILSLYAFALYGIDKRCAIRGQRRIPEHRLLLPALLGGWVGAYFGSMTFKHKTAKKRFVVLFRLTVSGNVLATLILIYSGLNLNQYGVASPCRTICTVCGFVALSFLLIHYXYFVPPEFFVKLGQNT

SEQ ID NO: 4079 - protein, 174 aa, Neisseria
  VARIANT (1)...(174): Xaa = Any Amino Acid
MKRQAFFKLMACAAFLSAVSLRLPVLGACYAILSLYAFALYGIDKRRAVRGKRRIPEHRLLLPALFGGWAGAYLGSRIFRHKTAKKRFVVLFRLTVSGNVLATLILIYSGLNLNQYGVASPXAQRERFSKVLKHQVNRFRTICTVCGFVALSFLLIHYXYFVPPEFFVKLGQNT

SEQ ID NO: 4080 - protein, 171 aa, Neisseria
MKQMLLAVGVGAVLAGCGKDAGGYEGYWREKSDKKEGVIAVKKKGNYFLNKINVFTGKEESLLLSEKDGALSINTGIGEIPIKLSDDGKELYVERRRYVKTDAAMKDKIIAHQKKCGQTAQAYLDARNALPSNQTYQQRQAAIEQLKRRFEAEFDELEKEIKCNGKPTLLF

SEQ ID NO: 4081 - protein, 50 aa, Neisseria
MKQMLLAVGVVAVLAGCGKDAGGYEGYWREKSDKKEGMIAVKKEKGNYFL

SEQ ID NO: 4082 - protein, 171 aa, Neisseria
MKQMLLAVGVAAVLAGCGKDAGGYEGYWREKSDKKEGVIAVKKKGNYFLNKINVFTGKEESLLLSEKDGALSINTGIGEIPIKLSDDGKELYVERRRYVKTDAAMKDKIIAHQKKCGQTAQAYLDARNALPSNQTYQQRQAAIEQLKRRFEAEFDELEKEIKCNGKPTLLF

SEQ ID NO: 4083 - protein, 173 aa, Neisseria
MKQMLLAVGVVAVLAGCGKDAGGYEGYWREKSDKKEGMIAVKKEKGNYFLNKIHVVTGKEESLLLSEKDGALSINTGIGEIPIKLSDDGKELYVERRQYVKTDAAMKDKIIAHQKKCGQTAQAYRDARNALPSNQTYQQHLAAIEQLKRRFEAEFDELEKEIKCNGRSPALLL

SEQ ID NO: 4084 - protein, 122 aa, Neisseria
NKINVFTGKEESMLLSEKDGALSINTGIGEIPIKLSDDGKELYVERRQYVKTDAAMKDKIIAHQKKCGQTAQAYLDARNALPSNQTYQQHQAAIEQLKRRFEAEFDELEKEIKCNGKPTLLF

SEQ ID NO: 4085 - protein, 163 aa, Neisseria
MKHTVSASVILLLTACAQLPQNNENLWQPSEHISSFAAEGRLAVKAEGKGSYANFDWTYQPPVETININTPLGSTLGQLCQDRDGALAVDGKGNVYQAEGTEDLSRQLVGFKLPIQYLHIWAEGRRVAGAPYRIRSDGILEQYGWTIGQNCRQWGASPNVATE

SEQ ID NO: 4086 - protein, 193 aa, Neisseria; identical to SEQ ID NO: 1446

SEQ ID NO: 4087 - protein, 241 aa, Neisseria
  VARIANT (1)...(241): Xaa = Any Amino Acid
MKTYAQALYTAALLTACSPAADSNHPSGQNAPANTESDGKNITLLNASYDVTRYFYKEYDHLFVGTYQSEHPGTSVSIQQSHGGFSKQALSVANGLQADVVTMNQSSDIDLLEKXGLVEKGWQQALPDHAAPYTSTMVFLVRKNNPKQIRDWNDLAKDGVNIVIAKTSGNGRYAFLGAYGYGLKANNGNEQEAQKLVASILKNTPVFENGGRXPPPPPSHNATSATYSSLLKTKPTTSAKN

SEQ ID NO: 4088 - protein, 242 aa, Neisseria
  VARIANT (1)...(242): Xaa = Any Amino Acid
MKTYAPALYTAALLTACSPAADSNHPSGQNAPANTESDGKNITLLNASYDVARDFYKEYNPLFIKTYQSEHPGTSVSIQQSHGGSSKQALSVANGLQADVVTMNQSSDIDLLEKKGLVEKGWQQALPDHAAPYTSTMVFLVRKNNPKQIRDWNDLAKDGVNIVIANPKTSGNGRYAFLGAYGYGLKTTNGNEQEAQKLVASILKNTPVFENGGRXPPPPSHNATSATYSSLLKTKPTTSAKN

SEQ ID NO: 4089 - protein, 242 aa, Neisseria
MKTYAPALYTAALLSACSPAADSNHPSGQNAPANTESDGKNITLLNASYDVARDFYKEYNPLFIKTYQSEHPGTSVSIQQSHGGSSKQALSVANGLQADVVTMNQSSDIDLLEKKGLVEKGWQQALPDHAAPYTSTMVFLVRKNNPKQIRDWNDLAKDGVNIVIANPKTSGNGRYAFLGAYGYGLKTTNGNEQEAQKLVASILKNTPVFENGGRAPPPPSHNATSATYSSLLKTKPTTSAKN

SEQ ID NO: 4090 - protein, 487 aa, Neisseria
MKLGFKPIPLAIAAVLCALVLALPVPDGVKPQAWTLLAMFVGVIAAIIGKVMPLGALSIIAVGLVAVTGVTADKPGAAMSDALSAFANPLIWLIAIAVMISRGLLKTGLGMRIGYLFIAVFGRKTLGIGYSLALSELLLAPVTPSNTARGGGIIHPIMQSIAGSYGSNPAKGTEGKMGKYLALVNYHSNPISSAMAITATAPNPLIVNLIAENLGSSFRLSWGAWAWAMAVPGVIAFFVMPLILYFLYPPEIKETPNAVQFAKDRLSEMGKMSADEIIMAVIFGILLLLWADVPALITGNHAFSINATATAFIGLSLLLLSGVLTWDDVLKEKSAWDTIIWFGALIMMAAFLNKLGLIKWFSGVLAESVGGLGVSGTAAGVILVLAYMYAHYMFASTTAHITAMFGAFLAAAVSLNAPAMPTALMMAAASNIMMTLTHYATGTSPVIFGSGYTTMGEWWKAGFIMSVVNFLIFSVIGSIWWKVLGYW

SEQ ID NO: 4091 - protein, 487 aa, Neisseria
  VARIANT (1)...(487): Xaa = Any Amino Acid
MKLGFKPIPLAIAAVLCALVLALPVPDGVKPQAWTLLAMFVGVIAAIIGKAMPLGALSIIAVGLVAVTGVTADKPGAAMSDALSAFANPLIWLIAIAVMISRGLLKTGLGMRIGYLFIAVFGRKTLGIGYSLALSELLLAPVTPSNTARGGGIIHPIMQSIAGSYGSNPAKGTEGKMGKYLALVNYHSNPISSAMFITATAPNPLIVNLIAENLGSSFRLSWGAWAWAMAVPGVIAFFVMPLILYXLYPPEIKETPNAVQFAKDRLREMGKMSADEIIMAVIFGILLLLWADVPALITGNHAFSINATATAFIGLSLLLLSGVLTWDDVLKEKSAWDTIIWFGALIMMAAFLNKLGLIKWFSGVLAESVGGLGVSGTAAGVILVLAYMYAHYMFASTTAHITAMFGAFFAAAVSLNAPAMPTALMMAAASNIMMTLTHYATGTSPVIFGSGYTTMGEWWKAGFIMSVVNFLIFFVIGSIWWKVLGYW

SEQ ID NO: 4092 - protein, 487 aa, Neisseria
MKLGFKPIPLAIAAVLCALVLALPVPDGVKPQAWTLLAMFIGVIAAIIGKAMPLGALSIIAVGLVAVTGVTADKPGAAMSDALSAFANPLIWLIAIAVMISRGLLKTGLGMRIGYLFIAVFGRKTLGIGYSLALSELLLAPVTPSNTARGGGIIHPIMQSIAGSYGSNPAKGTEGKMGKYLALVNYHSNPISSAMFITATAPNPLIVNLIAENLGSSFRLSWGAWAWAMAVPGVIAFFVMPLILYFLYPPEIKETPNAVQFAKDRLREMGKMSADEIIMAVIFGILLLLWADVPALITGNHAFSINATATAFIGLSLLLLSGVLTWDDVLKEKSAWDTIIWFGALIMMAAFLNKLGLIKWFSGVLAESVGGLGVSGTAAGVILVLAYMYAHYMFASTTAHITAMFGAFFAAAVSLNAPAMPTALMMAAASNIMMTLTHYATGTSPVIFGSGYTTMGEWWKAGFIMSVVNFLIFFVIGSIWWKVLGYW

SEQ ID NO: 4093 - protein, 160 aa, Neisseria
MKLPLSYLPNIRFLSWCCLLAGIIAPATLLASPNPAEIRMQQDIQQRQREEQLRQTMQPESDVRLHQKNTGETVNQLMGDDSSQPCFAINEWVLEGEHHARFQFALKRALRETGFQAGKCLHAGNINQIMSLAQNALIGRGYTTTRILAAPQDLNSGSFN

SEQ ID NO: 4094 - protein, 477 aa, Neisseria
GKCLHAGDINQIMSLAQNALIGRGYTTTRILAAPQDLNSGKLQLTLMPGYLRSIRIDRSNDDQTHAGRIAAFQNKFPTRSNDLLNLRDLEQGLENLKCLPTAEADLQIVPVEREPNQSDVVVQWRRLLPYCVSVGMDNSGSEATGKYQGNITFSADNPFGLSDMFYVNYGRSIGGTPDEENFDGHRKEGGSNNYAVHYSAPFGKWTWAFNHNGYRYHQAVSGLSEVYDYNGKSYNTDFGFNRLLYRDAKRKTYLSVKLWTRETKSYIDDAELTVQRRKTTGWLAELSHKGYIGRSTADFKLKYKHGTGMKDALRAPEEAFGEGTSRMKIWTASADVNTPFQIGKQLFAYDTSVHAQWNKTPLTSQDKLAIGGHHTVRGFDGEMSLPAERGWYWRNDLSWQFKPGHQLYLGADVGHVSGQSAKWLSGQTLAGTAIGIRGQIKLGGNLHYDIFTGRALKKPEYFQTKKWVTGFQVGYSF

SEQ ID NO: 4095 - protein, 595 aa, Neisseria
MKLPLSYLPNIRFLSWCCLLAGIIAPATLLASPNPAEIRMQQDIQQRQREEQLRQTMQPESDVRLHQKNTGETVNQLMGDDSSQPCFAINEVVLEGEHHARFQFALKRALRETGFQAGKCLHAGNINQIMSLAQNALIGRGYTTTRILAAPQDLNSGKLQLTLIPSYLRSIRIDRSNDDQTHAGRIAAFQNKFPTRSNDLLNLRDLEQGLENLKRLPTAEADLQIVPVEGEPNQSDVVVQWRQRLLPYRVSVGMDNSGSEATGKYQGNITFSADNPLGLSDMFYVNYGRSIGGTPDEESFDGHRKEGGSNNYAVHYSAPFGKWTWAFNHNGYRYHQAVSGLSEVYDYNGKSYNTDFGFNRLLYRDAKRKTYLGVKLWMRETKSYIDDAELTVQRRKTAGWLAELSHKEYIGRSTADFKLKYKRGTGMKDALRAPEEAFGEGTSRMKIWTASADVNTPFQIGKQLFAYDTSVHAQWNKTPLTSQDKLAIGGHHTVRGFDGEMSLSAERGWYWRNDLSWQFKPGHQLYLGADVGHVSGQSAKWLSGQTLVGTAIGIRGQIKLGGNLHYDIFTGRALKKPEFFQSRKWASGFQVGYTF

SEQ ID NO: 4096 - protein, 185 aa, Neisseria
MKPKFKTVLTALLLAVSLPSMAATRVLMETDMGNIRLVLDESKASKTVANFVRYARKGFYDNTIFHRVIGGFVIQGDGLTEDLVQKATDKAVANESGNGLKNTVGTIAMARTAAPDSAAAQFFINLADNGSLDYKNGQYGYTVFGRVESGMDTVSKIARVKTATRGFYQNVPVQPVKIRRVVVGQ

SEQ ID NO: 4097 - protein, 185 aa, Neisseria
  VARIANT (1)...(185): Xaa = Any Amino Acid
MKPKFKTVLTALLLAVSLPSMAATHVLMETDMGNIRLVLDESKAPKTVANFVRYARKGFYDDTVFHRVIDGFVIQGGGLTEDLAQKASDKAVANESGNGLKNTAGTIAMARTTAPDSATSQFFINLADXXSLDYKNGQYGYTVFGRVESGMNTVSKIARVKTATRGFYQNVPVQPVKIRRVVVGQ

SEQ ID NO: 4098 - protein, 185 aa, Neisseria
MKPKFKTVLTALLLAVSLPSMAATHVLMETDMGNIRLVLDESKAPKTVANFVRYARKGFYDNTIFHRVIGGFVIQGGGLTEDLAQKASDKAVANESGNGLKNTVGTIAMARTADPDSATSQFFINLVDNDSLNYKNGQYGYTVFGRVESGMNTVSKIARVKTATRGFYQNVPVQPVKIRRVVVGQ

SEQ ID NO: 4099 - protein, 112 aa, Neisseria; identical to SEQ ID NO: 1768

SEQ ID NO: 4100 - protein, 229 aa, Neisseria
MKKIIASALIATFALTACQDDTQARLERQQKQIEALQQQLAQQADDTVYQLTPEAVKDTIPAQAQANGNNGQPVTGKRRAAVYLRPIDRKLAAAKPDWRGGRRVYRQRAGKQIHTGGQPRQPRRPSRACCLPSVRTPQCAHQQGFEHAQPPCKTTGGAGAALPPDNAPARQLPPSRYARFRQKAVNPARQCRLKGFQTAFLYLLGALLCCRLIFRRHFVSKRLMSGWQF

SEQ ID NO: 4101 - protein, 205 aa, Neisseria
  VARIANT (1)...(205): Xaa = Any Amino Acid
RLEQQQKQIEALQQQLAQQADDTVYQLTPEAVKDTIPAEAQANGNNGQPVTGXRRAAVYLRPIDRKLAAAKPGRRGGRRVYRQRAGKQIHTGRQPRQSRRPARACSLPSVRTPQCAHQQGFEHAQPPCKTTGGAXAALPPDNAPXRQLPPPRYARFRQEAVNPARQCRLKSFQTAFXHLLGTLLCCRLIFRRHFVSKRLMSGWQF

SEQ ID NO: 4102 - protein, 228 aa, Neisseria
  VARIANT (1)...(228): Xaa = Any Amino Acid
MKKIIASALIATFALAACQDDAQARLEQQQKQIEALQQQLAQQADDTVYQLTPEAVKDTIPAEAQANGNNGQPVTXRRAAVYLRPIDRKLAAAKPGRRGGRRVYRQRAGKQIHTGRQPRQSRRPARACRLPSVRTSQCAHQQGFEHAQPPCKTTGGAGAALPPDNAPARQLPPPRHARFRQKAVNPACQCRLKGFQTAFLYLLGTLLCCRLIFRRHFVSKSLMSGWQF

SEQ ID NO: 4103 - protein, 505 aa, Neisseria; identical to SEQ ID NO: 2489

SEQ ID NO: 4104 - protein, 505 aa, Neisseria
MLYFRYGFLVVWCAAGVSAAYGADAPAILDDKALLQVQRSVSDKWAESDWKVDNDAPRVVDGDFLLAHPKMLEHSLRDVLNGNQADLIASLADLYAKLPDYDAVLYGRARALLAKLAGRPAEAVARYRELHGENAADERILLDLAAAEFDDFRLKSAERHFAEAEKLDLPAPVLENVGRFRKKAEGLTGWRFSGGISPAVNRNANNAAPQYCRQNGGRQICSVSRAERAAGLNYEIEAEKLTALADNHYLLFRSNIGGTSYYFSKKSAYDDGFGRAYLGWQYKNARQTAGILPFYQVQLSGSDGFDAKTKRVNNRRLPPYMLAHGVGVQLSHTYRPNPGWQFSVALEHYRQRYREQDRAEYNNGRQDGFYVSSAKRLGESATVFGGWQFVRFVPKRETVGGAVNNAAYRRNGVYAGWAQEWRQLGGLNSRVSASYARRNYKGVAAFSTEAQRNREWNVSLALSHDKLSYKGIVPALNYRFGRTESNVPYAKRRNSEVFVSADWRF

SEQ ID NO: 4105 - protein, 202 aa, Neisseria
MKPKPHTVRTLIAAVLSLALGGCFSAVVGGAAVGAKSVIDRRTTGAQTDDNVMALRIETTARSYLRQNNQTKGYTPQISVVGYNRHLLLLGQVATEGEKQFVGQIARSEQAAEGVYNYITVASLPRTAGDIAGDTWNTSKVRATLLGISPATQARVKIITYGNVTYVMGILTPEEQAQITQKVSTTVGVQKVITLYQNYVQR

SEQ ID NO: 4106 - protein, 128 aa, Neisseria
MKPKPHTVRTLIAAIFSLALSGCVSAVIGSAAVGAKSAVDRRTTGAQTDDNVMALRIETTARSYLRQNNQTKGYTPQISVVGYNRHLLLLGQVATEGEKQFVGQIARSEQAAEGVYNYITVASLPRTA

SEQ ID NO: 4107 - protein, 202 aa, Neisseria
MKPKPHTVRTLTAAVLSLALGGCVSAVVGGAAVGAKSAVDRRTTGAQTDDNVMALRIETTARSYLRQNNQTKGYTPQISVVGYNRHLLLLGQVATEGEKQFVGQIARSEQAAEGVYNYITVASLPRTAGDIAGDTWNTSKVRATLLGISPATQARVKIVTYGNVTYVMGILTPEEQAQITQKVSTTVGVQKVITLYQNYVQR

SEQ ID NO: 4108 - protein, 202 aa, Neisseria; identical to SEQ ID NO: 4105

SEQ ID NO: 4109 - protein, 202 aa, Neisseria; identical to SEQ ID NO: 2603

SEQ ID NO: 4110 - protein, 202 aa, Neisseria; identical to SEQ ID NO: 4107

SEQ ID NO: 4111 - protein, 288 aa, Neisseria
MKNILLVFVSFVPLCVRTDLPLNIEDIMTDKGKWKLETSLTYLNSENSRAALASPVYIQTGSASFIPVPTEIQENGSNTDMLAGTLGLRYGLTGNTDIYGSGSYLWHEERKLDGNGKTRNKRMSDISAGISHTFLKDGKNPALIAFLESTVYEKSRNKASSGKSWLIGATTYKAIDPIVLSLTAAYRINGSKTLSDDVKYKAGNYWMLNPNISFAANDRISLTGGIQWLGKQPDRIDGKKESARNTSTYAHFGAGFGFTKTAALNASARFNVSGQSSSELKLGVQHTF

SEQ ID NO: 4112 - protein, 289 aa, Neisseria; identical to SEQ ID NO: 1439

SEQ ID NO: 4113 - protein, 289 aa, Neisseria; identical to SEQ ID NO: 3576

SEQ ID NO: 4114 - protein, 74 aa, Neisseria
MKRLTLLAFVLAAGAVSASPKADVEKGKQVAATVCAACHAADGNSGIAMYPRLAAQHTAYIYHQTIGIRDVNAP

SEQ ID NO: 4115 - protein, 207 aa, Neisseria; identical to SEQ ID NO: 2327

SEQ ID NO: 4116 - protein, 112 aa, Neisseria; identical to SEQ ID NO: 3871

SEQ ID NO: 4117 - protein, 102 aa, Neisseria; identical to SEQ ID NO: 2650

SEQ ID NO: 4118 - protein, 102 aa, Neisseria; identical to SEQ ID NO: 2650

SEQ ID NO: 4119 - protein, 614 aa, Neisseria
MIMLPARFTILSVLAAALLAGQAYAAGAADVELPKEVGKVLRKHRRYSEEEIKNERARLAAVGERVNRVFTLLGGETALQKGQAGTALATYMLMLERTKSPEVAERALEMAVSLNAFEQAEMIYQKWRQIEPIPGEAQKRAGWLRNVLREGGNQHLDGLEEVLAQSDDVQKRRIFLLLVQAAVQQGGVAQKASKAVRRAALKYEHLPEAAVADAVFGVQGREKEKAIEALQRLAKLDTEILPPTLMTLRLTARKYPEILDGFFEQTDTQNLSAVWQEMEIMNLVSLRKPDDAYARLNVLLEHNPNANLYIQAAILAANRKEGASVIDGYAEKAYGRGTGEQRGRAAMTAAMIYADRRDYAKVRQWLKKVSAPEYLFDKGVLAAAAAAELDGGRAALRQIGRVRKLPEQQGRYFTADNLSKIQMLALSKLPDKREALIGLNNIIAKLSAAGSTEPLAEALAQRSIIYEQFGKRGKMIADLETALKLTPDNAQIMNNLGYSLLSDSKRLDEGFALLQTAYQINPDDTAVNDSIGWAYYLKGDAESALPYLRYSFENDPEPEVAAHLGEVLWALGERDQAVDVWTQAAHLRGDKKIWRETLKRYGIALPEPSRKPRK

SEQ ID NO: 4120 - protein, 616 aa, Neisseria
MIMLPNRFKMLTVLTATLIAGQVSAAGGGAGDMKQPKEVGKVFRKQQRYSEEEIKNERARLAAVGERVNQIFTLLGGETALQKGQAGTALATYMLMLERTKSPEVAERALEMAVSLNAFEQAEMIYQKWRQIEPIPGKAQKRAGWLRNVLRERGNQHLDGLEEVLAQADEGQNRRVFLLLAQAAVQQDGLAQKASKAVRRAALKYEHLPEAAVADVVFSVQGREKEKAIGALQRLAKLDTEILPPTLMTLRLTARKYPEILDGFFEQTDTQNLSAVWQEMEIMNLVSLHRLDDAYARLNVLLERNPNADLYIQAAILAANRKEGASVIDGYAEKAYGRGTEEQRSRAALTAAMMYADRRDYAKVRQWLKKVSAPEYLFDKGVLAAAAAVELDGGRAALRQIGRVRKLPEQQGRYFTADNLSKIQMLALSKLPDKREALRGLDKIIEKPPAGSNTELQAEALVQRSVVYDRLGKRKKMISDLERAFRLAPDNAQIMNNLGYSLLTDSKRLDEGFALLQTAYQINPDDTAVNDSIGWAYYLKGDAESALPYLRYSFENDPEPEVAAHLGEVLWALGERDQAVDVWTQAAHLTGDKKIWRETLKRHGIALPQPSRKPRK

SEQ ID NO: 4121 - protein, 612 aa, Neisseria
MLPARFTILSVLAAALLAGQAYAAGAADAKPPKEVGKVFRKQQRYSEEEIKNERARLAAVGERVNQIFTLLGGETALQKGQAGTALATYMLMLERTKSPEVAERALEMAVSLNAFEQAEMIYQKWRQIEPIPGKAQKRAGWLRNVLRERGNQHLDGLEEVLAQADEGQNRRVFLLLAQAAVQQDGLAQKASKAVRRAALRYEHLPEAAVADVVFSVQGREKEKAIGALQRLAKLDTEILPPTLMTLRLTARKYPEILDGFFEQTDTQNLSAVWQEMEIMNLVSLHRLDDAYARLNVLLERNPNADLYIQAAILAANRKEGASVIDGYAEKAYGRGTGEQRGRAAMTAAMIYADRRDYTKVRQWLKKVSAPEYLFDKGVLAAAAAVELDGGRAALRQIGRVRKLPEQQGRYFTADNLSKIQMFALSKLPDKREALRGLDKIIEKPPAGSNTELQAEALVQRSVVYDRLGKRKKMISDLERAFRLAPDNAQIMNNLGYSLLSDSKRLDEGFALLQTAYQINPDDTAVNDSIGWAYYLKGDAESALPYLRYSFENDPEPEVAAHLGEVLWALGERDQAVDVWTQAAHLTGDKKIWRETLKRHGIALPQPSRKPRK

SEQ ID NO: 4122 - protein, 202 aa, Neisseria
LSYRLNAAPMFNDNPVVYGKIKLQSWKARRDFNIVKQDLDFSCGAASVATLLNNFYGQKLTEEEVLEKLGKEQMRASFEDMRRIMPDLGFEAKGYALSFEQLAQLKIPVIVYLKYRKDDHFSVLRGVDGNTVLLADPSPGHVSMSRAQFLEAWQTREGNLAGKILAVVPKKAEAISNKLFFTHHPKRQTEFAVGQVKWWRAY

SEQ ID NO: 4123 - protein, 218 aa, Neisseria; identical to SEQ ID NO: 1428

SEQ ID NO: 4124 - protein, 250 aa, Neisseria
  VARIANT (1)...(250): Xaa = Any Amino Acid
XCANBEANYNATRALLYCCRRINGAMINACIDMMKFKYVFLLACVVVSLSYRLNAAPMFNDNPVVYGKIKVQSWKERRDFNIVKQDLDFSCGAASVATLLNNFYGQTLTEEEVLKKLDKEQMRASFEDMRRIMPDLGFEAKGYALSFEQLAQLKIPVIVYLKYRKDDHFSVLRGIDGNTVLLADPSLGHVSMSRAQFXDAWQTREGNLAGKILAVVPKKAETISNKLFFTHHPKRQTEFAVGQIRQARAE

SEQ ID NO: 4125 - protein, 186 aa, Neisseria
MKKIIFAALAAAAVGTASATYKVDEYHANVRFAIDHFNTSTNVGGFYGLTGSVEFDQAKRDGKIDITIPVANLQSGSQPFTGHLKSADIFDAAQYPDIRFVSTKFNFNGKKLVSVDGNLTMRGKTAPVKLKAEKFNCYQSPMAETEVCGGDFSTTIDRTKWGVDYLVNAGMTKNVRIDIQIEAAKQ

SEQ ID NO: 4126 - protein, 187 aa, Neisseria; identical to SEQ ID NO: 1596

SEQ ID NO: 4127 - protein, 187 aa, Neisseria
MKKIIIAALAAAAIGTASAATYKVDEYHANARFSIDHFNTSTNVGGFYGLTGSVEFDQAKRDGKIDITIPVANLQSGSQHFTDHLKSADIFDAAQYPDIRFVSTKFNFNGKKLVSVDGNLTMHGKTAPVKLKAEKFNCYQSPMLKTEVCGGDFSTTIDRTKWGMDYLVNVGMTKSVRIDIQIEAAKQ

SEQ ID NO: 4128 - protein, 158 aa, Neisseria
MKKFYFVLLALGLAACGQEQSQKADAEQYFFANKYQFADEKQAFYFERAARFRVLQQGLGGDFERFLKGEIPNQENLAKYRENITQAVAYYADTNGDDDPYRVCKQAAQDAEILMKSMVTSGGGGTTDLDKESYQNYRKSMQECRKTITEAEANLPKK

SEQ ID NO: 4129 - protein, 331 aa, Neisseria
MFKKFKPVLLSFFALVFAFWLGTGIAYEINPRWFLSDTATEVPENPNAFVAKLARLFRNADRAVVIVKESMRTEESLAGAVDDGPLQSEKDYLALAIRLSRLKEKAKWFHVTEQEHGEEVWLDYYIGEGGLVAVSLSQRSPEAFVNAEYLYRNDRPFSVNVYGGTAHGENYETTGEYRVVWQPDGSVFDAAGRGKIGEDVYEHCLGCYQMAQVYLAKYRDVANDEQKVWDFREESNRIASDSRDYVFYQNMRELMPRGMKANSLVVGYDADGLPQKVYWSVDNGKKPQSVEYYLKNGNLFIAQSSTVTLKTDGVTADMQTYHAQQTLYLDG

SEQ ID NO: 4130 - protein, 377 aa, Neisseria; identical to SEQ ID NO: 948

SEQ ID NO: 4131 - protein, 374 aa, Neisseria; identical to SEQ ID NO: 3898

SEQ ID NO: 4132 - protein, 801 aa, Neisseria
LARLFSLKPLVLALGFCFGTHCAADTVAAEEADGRVAEGGAQGASESAQASDLTLGSTCLFCSNESGSPERTEAAVQGSGEASVPEDYTRIVADRMEGQSKVKVRAEGSVIIERDGAVLNTDWADYDQSGDTVTVGDRFALQQDGTLIRGETLTYNLDQQTGEAHNVRMETEQGGRRLQSVSRTAEMLGEGRYKLTETQFNTCSAGDAGWYVKAASVEADRGKGIGVAKHAAFVFGGVPLFYTPWADFPLDGNRKSGLLVPSVSAGSDGVSLSVPYYFNLAPNFDATFAPGIIGERGATFDGQIRYLRPDYSGQTDLTWLPHDKKSGRNNRYQAKWQHRHDISDTLQAGVDFNQVSDSGYYRDFYGGEEIAGNVNLNRRVWLDYGGRAAGGSLNAGLSVQKYQTLANQSGYKDEPYAIMPRLSADWHKNAGRAQIGVSAQFTRFSHDGRQDGSRLVVYPGIKWDFSNSWGYVRPKLGLHATYYSLDSFGGKASRSVGRVLPVVNIDGGTTFERNTRLFGGGVVQTIEPRLFYNYIPAKSQNDLPNFDSSESSFGYGQLFRENLYYGNDRINAANSLSTAVQSRILDGATGEERFRAGIGQKFYFKDDAVMLDGSVGKNPRSRSDWVAFASGGIGGRFTLDSSIHYNQNDKRAEHYAVGAGYRPAPGKVLNARYKYGRNEKIYLQADGSYFYDKLSQLDLSAQWPLTRNLSAVVRYNYGFEAKKPIEMLAGAEYKSSCGCWGAGVYAQRYVTGENTYKNAVFFSLQLKDLSSVGRNPAGRMDVAVPGYIPAHSLSAGRNKRP

SEQ ID NO: 4133 - protein, 802 aa, Neisseria
LARLFSLKPLVLALGLCFGTHCAAADAVAAEETDNPTAGESVRSVSEPIQPTSLSLGSTCLFCSNESGSPERTEAAVQGSGEASIPEDYTRIVADRMEGQSQVQVRAEGNVVVERNRTTLNTDWADYDQSGDTVTAGDRFALQQDGTLIRGETLTYNLEQQTGEAHNVRMEIEQGGRRLQSVSRTAEMLGEGHYKLTETQFNTCSAGDAGWYVKAASVEADREKGIGVAKHAAFVFGGVPIFYTPWADFPLDGNRKSGLLVPSLSAGSDGVSLSVPYYFNLAPNLDATFAPSVIGERGAVFDGQVRYLRPDYAGQSDLTWLPHDKKSGRNNRYQAKWQHRHDISDTLQAGVDFNQVSDSGYYRDFYGNKEIAGNVNLNRRVWLDYGGRAAGGSLNAGLSVLKYQTLANQSGYKDKPYALMPRLSVEWRKNTGRAQIGVSAQFTRFSHDSRQDGSRLVVYPDIKWDFSNSWGYVRPKLGLHATYYSLNRFGSQEARRVSRTLPIVNIDSGATFERNTRMFGGEVLQTLEPRLFYNYIPAKSQNDLPNFDSSESSFGYGQLFRENLYYGNDRINTANSLSAAVQSRILDGATGEERFRAGIGQKFYFKDDAVMLDGSVGKKPRNRSDWVAFASGSIGSRFILDSSIHYNQNDKRAENYAVGASYRPAQGKVLNARYKYGRNEKIYLKSDGSYFYDKLSQLDLSAQWPLTRNLSAVVRYNYGFEAKKPIEVLAGAEYKSSCGCWGAGVYAQRYVTGENTYKNAVFFSLQLKDLSSVGRNPADRMDVAVPGYITAHSLSAGRNKRP

SEQ ID NO: 4134 - protein, 802 aa, Neisseria
LARLFSLKPLVLALGFCFGTHCAAADAVAAEETDNPTAGGSVRSVSEPIQPTSLSLGSTCLFCSNESGSPERTEAAVQGSGEASIPEDYTRIVADRMEGQSQVQVRAEGNVVVERNRTTLNADWADYDQSGDTVTAGDRFALQQDGTLIRGETLTYNLEQQTGEAHNVRMETEHGGRRLQSVSRTAEMLGEGHYKLTETQFNTCSAGDAGWYVKAASVEADREKGIGVAKHAAFVFGGVPIFYTPWADFPLDGNRKSGLLVPSLSAGSDGVSLSVPYYFNLAPNLDATFAPGVIGERGAVFDGQVRYLRPDYAGQSDLTWLPHDKKSGRNNRYQAKWQHRHDISDTLQAGVDFNQVSDSGYYRDFYGNKEIAGNVNLNRRVWLDYGGRAAGGSLNAGLSVLKYQTLANQSGYKDKPYALMPRLSADWRKNTGRAQIGVSAQFTRFSHDSRQDGSRLVVYPDIKWDFSNSWGYVRPKLGLHATYYSLNRFGSQEARRVSRTLPIVNIDSGMTFERNTRMFGGGVLQTLEPRLFYNYIPAKSQNDLPNFDSSESSFGYGQLFRENLYYGNDRINTANSLSAAVQSRILDGATGEERFRAGIGQKFYFKNDAVMLDGSVGKKPRSRSDWVAFASSGIGSRFILDSSIHYNQNDKRAENYAVGASYRPAQGKVLNARYKYGRNEKIYLKSDGSYFYDKLSQLDLSAQWPLTRNLSAVVRYNYGFEAKKPIEVLAGAEYKSSCGCWGAGVYAQRYVTGENTYKNAVFFSLQLKDLSSVGRNPADRMDVAVPGYIPAHSLSAGRNKRP

SEQ ID NO: 4135 - protein, 108 aa, Neisseria; identical to SEQ ID NO: 3922

SEQ ID NO: 4136 - protein, 108 aa, Neisseria; identical to SEQ ID NO: 855

SEQ ID NO: 4137 - protein, 108 aa, Neisseria; identical to SEQ ID NO: 3924

SEQ ID NO: 4138 - protein, 540 aa, Neisseria; identical to SEQ ID NO: 1078

SEQ ID NO: 4139 - protein, 364 aa, Neisseria; identical to SEQ ID NO: 535

SEQ ID NO: 4140 - protein, 422 aa, Neisseria
  VARIANT (1)...(422): Xaa = Any Amino Acid
LTNRGGAKLKTXSKSSERMSEVEYFSHFISDGKGKLLEIPQRRGKQDGVFVDWISFTFHEDTLLKVSGCPLFSDAEYMYVLSRKLEEILGFGITRKCKSRGNKFYESMYRLGSDDVDYGEVHFGXQRNTVLVELKGTGCSVASPGWELRLKQFLDDSIRTRITRIDLALDFFDGEYTPDQALLDHDNGFFDNSNQRPKSETIGTAWRNEDGSGKTFYVGRKKNSRFVRVYEKGRQLGDKESKWVRFEIQFNYGDIEIPLDILINQGSYFCGAFPICRKFKNMPVPERFDQRKKKLNLTFEHKLHYAKNAVGKLVNFMIEMGFDNSEIVESLKADSGFPKGLEPEKYALEMLRDGLKHGFIHEQPDIDLEIELDELGVIAFKNSDKFDREKRLFSPDYDVEKERKYQEYLSKVYHQNVDYDYF

SEQ ID NO: 4141 - protein, 422 aa, Neisseria
LTNRGGAKLKTNSKSSERMSEVEYFSHFISDGKGKLLEIPQRRGKQDGVFVDWISFTFHEDTLLKVSGCPLFSDAEYMYVLSRKLEEILGFGITRKCKSRGNKFYESMYRLGSDDVDYGEVHFGGQRNTVLVELKGTGCSVASPGWELRLKQFLDDSIRTRITRIDLALDFFDGEYTPDQALLDHDNGFFDNSNQRPKSETIGTAWRNEDGSGKTFYVGRKKNSRFVRVYEKGRQLGDKESKWVRFEIQFNYGDIEIPLDILINQGSYFCGAFPICRKFKNMPVPERFDQRKKTLNLTFEHKLHYAKNAVGKLVNFMIEMGFDNSEIVESLKADSGFPKGLEPEKYALEMLRDGLKHGFIHEQPDIDLEIELDELGVIAFKNSDKFDREKRLFSPDYDVEKERKYQEYLSKVYHQNVDYDYF

SEQ ID NO: 4142 - protein, 274 aa, Neisseria
MDGAQPKTNFFERLIARLAREPDSAEDVLNLLRQAHEQEVFDADTLTRLEKVLDFAELEVRDAMITRSRMNVLKENDSIERITAYVIDTAHSRFPVIGEDKDEVLGILHAKDLLKYMFNPEQFHLKSVLRPAVFVPEGKSLTALLKEFREQRNHMAIVIDEYGGTSGLVTFEDIIEQIVGDIEDEFDEDESADDIHSVSAERWRIHAATEIEDINAFFGTEYGSEEADTIGGLVIQELGHLPVRGEKVLIGGLQFTVARADNRRLHTLMATRVK

SEQ ID NO: 4143 - protein, 274 aa, Neisseria
  VARIANT (1)...(274): Xaa = Any Amino Acid
MDGAQPKTNFFERLIARLAREPDSAEDVLNLLRQAHEQEVFDADTLLRLEKVLDFSDLEVRDAMITRSRMNVLKENDSIERITAYVIDTAHSRFPVIGEDKDEVLGILHAKDLLKYMFNPEQFHLKSILRPAVFVPEGKSLTALLKEFREQRNHMAIVIDEYGGTSGLVTFEDIIEQIVGEIEDEFDEDDSADNIHAVSSERWRIHAATEIEDINTFFGTEYSXEEADTIGGLVIQELGHLPVRGEKVLIGGLQFTVARADNRRLHTLMATRVK

SEQ ID NO: 4144 - protein, 274 aa, Neisseria
MDGAQPKTNFFERLIARLAREPDSAEDVLTLLRQAHEQEVFDADTLLRLEKVLDFSDLEVRDAMITRSRMNVLKENDSIERITAYVIDTAHSRFPVIGEDKDEVLGILHAKDLLKYMFNPEQFHLKSILRPAVFVPEGKSLTALLKEFREQRNHMAIVIDEYGGTSGLVTFEDIIEQIVGDIEDEFDEDESADNIHAVSAERWRIHAATEIEDINAFFGTEYSSEEADTIGGLVIQELGHLPVRGEKVLIGGLQFTVARADNRRLHTLMATRVK

SEQ ID NO: 4145 - protein, 266 aa, Neisseria
MKKWIAAALACSALALSACGGQGKDAAAPAANPGKVYRVASNAEFAPFESLDSKGNVEGFDVDLMNAMAKAGNFKIEFKHQPWDSLFPALNNGDADVVMSGVTITDDRKQSMDFSDPYFEITQVVLVPKGKKVSSSEDLKKMNKVGVVTGHTGDFSVSKLLGNDNPKIARFENVPLIIKELENGGLDSVVSDSAVIANYVKNNPAKGMDFVTLPDFTTEHYGIAVRKGDEATVKMLNDALEKVRESGEYDKIYAKYFAKEGGQAAK

SEQ ID NO: 4146 - protein, 266 aa, Neisseria
MKKWIAAALACSALALSACGGQGKDTAAPAANPDKVYRVASNAEFAPFESLDSKGNVEGFDVDLMNAMAKAGNFKIEFKHQPWDSLFPALNNGDADVVMSGVTITDDRKQSMDFSDPYFEITQVVLVPKGKKVSSSEDLKNMNKVGVVTGYTGDFSVSKLLGNDNPKIARFENVPLIIKELENGGLDSVVSDSAVIANYVKNNPAKGMDFVTLPDFTTEHYGIAVRKGDEATVKMLNDALEKVRESGEYDKIYAKYFAKEDGQAAK

SEQ ID NO: 4147 - protein, 266 aa, Neisseria
MKKWIAAALACSALALSACGGQGKDAAAPAANPDKVYRVASNAEFAPFESLDSKGNVEGFDVDLMNAMAKAGNFKIEFKHQPWDSLFPALNNGDADVVMSGVTITDDRKQSMDFSDPYFEITQVVLVPKGKKISSSEDLKNMNKVGVVTGYTGDFSVSKLLGNDNPKIARFENVPLIIKELENGGLDSVVSDSAVIANYVKNNPTKGMDFVTLPDFTTEHYGIAVRKGDEATVKMLNDALKKVRESGEYDKIYAKYFAKEDGQAAK

SEQ ID NO: 4148 - protein, 544 aa, Neisseria
IASQNLRFDNRFLQKMVNGVNILPAADWVALGAKGRNVVVDRAFGGPHITKDGVTVAKEIELKDKFENMGAQMVKEVASKTNDVAGDGTTTATVLAQSIVAEGMKYVTAGMNPTDLKRGIDKAVAALVEELKNIAKPCDTSKEIAQVGSISANSDEQVGAIIAEAMEKVGKEGVITVEDGKSLENELDVVEGMQFDRGYLSPYFINDAEKQIAGLDNPFVLLFDKKISNIRDLLPVLEQVAKASRPLLIIAEDVEGEALATLVVNNIRGILKTVAVKAPGFGDRRKAMLQDIAILTGGVVISEEVGLSLEKATLDDLGQTKRIEIGEENTTVIDGFGDAAQIEARVAEIRQQIETATSDYDKEKLQERVAKLAGGVAVIKVGAATEVEMKEKKDRVEDALHATRAAVEEGVVAGGGVALLRARAALENLHTGNADQDAGVQIVLRAVESPLRQIVANAGGEPSVVVNKVLEGKGNYGYNAGSGEYGDMIGMGVLDPAKVTRSALQHAASIAGLMLTTDCMIAEIPEEKPAVPDMGGMGGMGGMM

SEQ ID NO: 4149 - protein, 1635 aa, Neisseria
ATGGCAGCAAAAGACGTACAGTTCGGCAATGAAGTCCGTCAAAAAATGGTAAACGGCGTGAACATTCTGGCAAACGCCGTCCGCGTAACCTTGGGCCCCAAAGGTCGCAACGTAGTCGTTGACCGCGCATTCGGCGGCCCGCACATCACCAAAGACGGCGTAACCGTCGCCAAAGAAATCGAACTGAAAGACAAGTTTGAAAATATGGGCGCGCAAATGGTGAAAGAAGTTGCGTCCAAAACCAACGACGTGGCAGGCGACGGTACGACTACCGCCACCGTACTGGCGCAATCCATCGTTGCCGAAGGTATGAAATATGTTACCGCAGGTATGAATCCGACCGACCTGAAACGCGGTATCGATAAAGCCGTCGCCGCTTTGGTTGACGAACTGAAAAACATCGCCAAACCTTGCGACACTTCTAAAGAAATCGCCCAAGTCGGCTCTATTTCCGCCAACTCCGACGAACAAGTCGGCGCGATTATCGCCGAAGCGATGGAAAAAGTCGGCAAAGAAGGCGTGATTACCGTTGAAGACGGCAAGTCTTTGGAAAACGAGCTGGACGTAGTTGAAGGTATGCAGTTCGACCGCGGCTACCTGTCTCCTTACTTCATCAACGATGCGGAAAAACAAATCGCTGCTTTGGACAATCCGTTTGTATTGTTGTTCGACAAAAAAATCAGCAACATCCGCGACCTGCTGCCTGTTTTGGAACAAGTGGCAAAAGCCAGCCGTCCGCTGTTGATTATCGCTGAAGACGTAGAAGGCGAAGCCTTGGCGACTTTGGTCGTGAACAACATCCGAGGCATCCTGAAAACCGTTGCCGTCAAAGCCCCTGGCTTCGGCGACCGCCGCAAAGCGATGTTGCAAGACATCGCCATCCTGACCGGCGGCGTGGTGATTTCCGAAGAAGTCGGTCTGTCTTTGGAAAAAGCGACTTTGGACGACTTGGGTCAAGCCAAACGCATCGAAATCGGTAAAGAAAACACCACCATCATCGACGGCTTTGGCGACGCAGCCCAAATCGAAGCGCGTGTTGCCGAAATCCGCCAACAAATCGAAACCGCAACCAGCGATTACGACAAAGAAAAACTGCAAGAGCGCGTGGCTAAATTGGCAGGCGGCGTGGCAGTCATCAAAGTCGGTGCCGCGACCGAAGTCGAAATGAAAGAGAAAAAAGACCGCGTGGAAGACGCGCTGCACGCTACCCGCGCAGCCGTTGAAGAAGGCGTGGTTGCAGGCGGCGGCGTAGCCCTGTTGCGTGCCCGTGCTGCTTTGGAAAACCTGCACACCGGCAATGCCGACCAAGACGCAGGCGTACAAATCGTCTTGCGCGCCGTTGAGTCTCCGCTGCGCCAAATCGTTGCCAACGCAGGCGGCGAACCCAGCGTGGTTGTGAACAAAGTATTGGAAGGCAAAGGCAACTACGGTTACAACGCTGGCAGCGGCGAATACGGCGATATGATCGAAATGGGCGTACTCGACCCCGCCAAAGTAACCCGTTCTGCGCTGCAACACGCCGCATCTATCGCCGGCTTGATGCTGACCACTGATTGCATGATCGCTGAAATCCCCGAAGACAAACCGGCTGTGCCTGATATGGGCGGCATGGGTGGTATGGGCGGCATGATGTAA

SEQ ID NO: 4150 - protein, 544 aa, Neisseria
MAAKDVQFGNEVRQKMVNGVNILANAVRVTLGPKGRNVVVDRAFGGPHITKDGVTVAKEIELKDKFENMGAQMVKEVASKTNDVAGDGTTTATVLAQSIVAEGMKYVTAGMNPTDLKRGIDKAVAALVEELKNIAKPCDTSKEIAQVGSISANSDEQVGAIIAEAMEKVGKEGVITVEDGKSLENELDVVEGMQFDRGYLSPYFINDAEKQIAGLDNPFVLLFDKKISNIRDLLPVLEQVAKASRPLLIIAEDVEGEALATLVVNNIRGILKTVAVKAPGFGDRRKAMLQDIAILTGGTVISEEVGLSLEKATLDDLGQAKRIEIGKENTTIIDGFGDAAQIEARVAEIRQQIETATSDYDKEKLQERVAKLAGGVAVIKVGAATEVEMKEKKDRVEDALHATRAAVEEGVVAGGGVALLRARAALENLHTGNADQDAGVQIVLRAVESPLRQIVANAGGEPSVVVNKVLEGKGNYGYNAGSGEYGDMIEMGVLDPAKVTRSALQHAASIAGLMLTTDCMIAEIPEDKPAMPDMGGMGGMGGMM

SEQ ID NO: 4151 - protein, 499 aa, Neisseria
VFKKYQYFALAALCAALLAGCEKAGSFFGADKKEASFVERIEHTKDDGSVSMLLPDFAQLVQSEGPAVVNIQAAPAPRTQNGSGNAETDSDPLADSDPFYEFFKRLVPNMPEIPQEEADDGGLNFGSGFIISKNGYILTNTHVVAGMGSIKVLLNDKREYTAKLIGSDVQSDVALLKIDATEELPVVKIGNPKNLKPGEWVAAIGAPFGFDNSVTAGIVSAKGRSLPNESYTPFIQTDVAINPGNSGGPLFNLKGQVVGINSQIYSRSGGFMGISFAIPIDVAMNVAEQLKNTGKVQRGQLGVIIQEVSYGLAQSFGLDKASGALIAKILPGSPAERAGLQAGDIVLSLDGGEIRSSGDLPVMVGAITPGKEVSLGVWRKGEEITIKAKLGNAAEHTGASSKTDEAPYTEQQSGTFSVESAGITLQTHTDSSGKHLVVVRVSDAAERAGLRRGDEILAVGQVPVNDEAGFRKAMDKAGKNVPLLVMRRGNTLFIALNLQ

SEQ ID NO: 4152 - protein, 499 aa, Neisseria
VFKKYQYLALAALCAASLAGCDKAGSFFVADKKEASFVERIEHTKDDGSVSMLLPDFAQLVQSEGPAVVNIQAAPAPRTQNGSGNAENDSDPIADNDPFYEFFKRLVPNMPEIPQEEADDGGLNFGSGFIISKDGYILTNTHVVTGMGSIKVLLNDKREYTAKLIGSDVQSDVALLKIDATEELPVVKIGNPKDLKPGEWVAAIGAPFGFDNSVTAGIVSAKGRSLPNESYTPFIQTDVAINPGNSGGPLFNLKGQVVGINSQIYSRSGGFMGISFAIPIDVAMNVAEQLKNTGKVQRGQLGVIIQEVSYGLAQSFGLDKAGGALIAKILPGSPAERAGLQAGDIVLSLDGGEIRSSGDLPVMVGAITPGKEVSLGVWRKGEEITIKVKLGNAAEHIGASSKTDEAPYTEQQSGTFSVESAGITLQTHTDSSGGHLVVVRVSDAAERAGLRRGDEILAVGQVPVNDEAGFRKAMDKAGKNVPLLIMRRGNTLFIALNLQ

SEQ ID NO: 4153 - protein, 499 aa, Neisseria
  VARIANT (1)...(499): Xaa = Any Amino Acid
VFKKYQYLALAALCAASLAGCDKAGSFFGADKKEASFVERIKHTKDDGSVSMLLPDFVQLVQSEGPAVVNIQAAPAPRTQNGSSNAETDSDPLADSDPFYEFFKRLVPNMPEIPQEEADDGGLNFGSGFIISKDGYILTNTHVVTGMGSIKVLLNDKREYTAKLIGSDVQSDVALLKIDATEELPVVKIGNPKDLKPGEWVAAIGAPFGFDNSVTAGXVSAKGRSLPNESYTPFIQTDVAINPGNSGGPLFNLKGQVVGINSQIYSRSGGFMGISFAIPIDVAMNVAEQLKNTGKVQRGQLGVIIQEVSYGLAQSFGLDKAGGALIAKILPGSPAERAGLRAGDIVLSLDGGEIRSSGDLPVMVGAITPGKEVSLGVWRKGEEITIKVKLGNAAEHIGASSKTDEAPYTEQQSGTFSVESAGITLQTHTDSSGGHLVVVRVSDAAERAGLRRGDEILAVGQVPVNDEAGFRKAMDKAGKNVPLLIMRRGNTLFIALNLQ

SEQ ID NO: 4154 - protein, 507 aa, Neisseria
MKTRSLISLLCLLLCSCSSWLPPLEERTESRHFNTSKPVLLDNILQIRHTPHNNGLSDIYLLDDPHEAFAARAALIESAEHSLDLQYYIWRNDISGRLLFNLMYLAAERGVRVRLLLDDNNTRGLDDLLLALDSHPNIVRLFNPFVLRKWRALGYLTDFPRLNRRMHNKSFTADNRATILGGRNIGDEYFKVGEDTVFADLDILATGSVVGEVSHDFDRYWASHSAHNATRIIRSGNIGKGLQALGYNDETSRHALLRYRETVEQSPLYQKIQTGRIDWQSVQTRLISDSPAKGLDRDRRKPPIAGRLQDALKQPEKSVYLVSPYFVPTKSGTDALAKLVQDGIDVTVLTNSLQATDVAAVHSGYVKYRKPLLKAGIKLYELQPNHAVPATKDKGLTGSSVTSLHAKTFIVDGKRIFIGSFNLDPRSARLNTEMGVVIESPKIAEQMERTLADTTPEYAYRVTLDKHNRLQWHDPATRKTYPNEPEAKLWKRIAAKILSLLPIEGLL

SEQ ID NO: 4155 - protein, 508 aa, Neisseria; identical to SEQ ID NO: 1976

SEQ ID NO: 4156 - protein, 508 aa, Neisseria
MKTRSLISLLCLLLCSCSSWLPPLEERTESRHFNTSKPVRLDNILQIRHTPHTNGLSDIYLLNDPHEAFAARAALIESAEHSLDLQYYIWRNDISGRLLFNLVYLAAERGVRVRLLLDDNNTRGLDDLLLALDSHPNIEVRLFNPFVLRKWRALGYLTDFPRLNRRMHNKSFTADNRATILGGRNIGDEYFKVGEDTVFADLDILATGSVVGEVSHDFDRYWASHSAHNATRIIRSGNIGKGLQALGYNDETSRHALLRYRETVEQSPLYQKIQTGRIDWQSVQTRLISDDPAKGLDRDRRKPPIAGRLQDALKQPEKSVYLVSPYFVPTKSGTDALAKLVQDGIDVTVLTNSLQATDVAAVHSGYVKYRKPLLKAGIKLYELQPNHAVPATKDKGLTGSSVTSLHAKTFIVDGKRIFIGSFNLDPRSARLNTEMGVVIESPKIAEQMERTLADTSPEYAYRVTLDRHNRLQWHDPATRKTYPNEPEAKLWKRIAAKILSLLPIESLL

SEQ ID NO: 4157 - protein, 792 aa, Neisseria
MNKNIKSLNLREKDPFLSREKQRYEHPLPSREWIIELLERKGVPSKIESLARELSITEDEYVFFERRLKAMARDGQVLINRRGAVCAADKLDLVKCRVEAHKDGFGFAVPLMPMDEGDFVLYERQMRGVMHGDTVTVRPAGMDRRGRREGTFLDIVERAQSKVVGRFYMDRGVAILEPEDKRLNQSIVLEPDGVARFKPESGQVIVGKIEVYPEQNRPAVAKIIEVLGDYADSGMEIEIAVRKHHLPHRFSEACAKSAKKIPDHVRKSDLKGRVDLCDLPLVTIDGETARDFDDAVFAEKVGRNYRLVVAIADVSHYVRPDDAIDADAQERSTSVYFPRRMIPMLPENLSNGICSLNPDVERLCMVCDMVVTYAGNIKEYRFYPAVMRSHARLTYNQVWKWLSDGIGNPHKAQIDTLYKLFKILQKKRLARGAVEFESVETQMIFDDNGKIEKIVPVVRNDAHKLIEECMLAANVCAADFLLKNKHTALFRNHLGPTPEKLATLREQLGLLGLQLGGGDNPSPKDYAALAEQFKGRPDAELLQVMMLRSMQQAVYEPHCEGHFGLAYEAYAHFTSPIRRYPDLTVHRAIKAVLNRKTYTPNKSWQALGVHTSFCERRADDAGRDVENWLKTYYMRDKVGEIFEGKISRGVANFGIFVTLDDIHIDGLVHISDLGEDYFNFRPEIMAIEGERSGIRFNMGDRVAVRVARADLDDGKIDFVLIAGESGRRRKVKLSASAKPAGAAGKGKSKTTAEKKTARCGKVRGRGVPAVAESGKKAKKPVPIKVKKRKGKS

SEQ ID NO: 4158 - protein, 641 aa, Neisseria
TVLDIVERAQSKVVGRFYMDRGVAILEPEDKRLNQSIVLEPDGVARFKPESGQVIVGEIEVYPEQNRPAVAKIIEVLGDYADSGMEIEIAVRKHHLPHQFSEACAKAAKKIPVHVRKSDLKGRVDLRDLPLVTIDGETARDFDDAVFAEKVGRNYRLVVAIADVSHYVRPDDVIDADAQERSTSVYFPRRVIPMLPENLSNGICSLNPDVERLCMVCDMVVTYAGNIKEYRFYPAVMRSHARLTYNQVWKWISDGIDHPYKAQIDTLYKLFKILQKKRFERGAVEFESVETQMIFDDNGKIEKIVPVVRNDAHKLIEECMLAANVCAADFLLKNKHTALFRNHLGPTPEKLATLREQLGLLGLQLGGGDNPSPKDYAALVEQFKGRPDAELLQVMMLRSMQQAVYEPHCDGHFGLAYEAYAHFTSPIRRYPDLTVHRAIKAVLNQQTYTPKKSWQALGVHTSFCERRADDASRDVENWLKTYYMRDKVGEVFEGKISGMTSFGIFVTLDGIHIDGLVHISDLGEDYFNFRPEIMAIEGERSGIRFNMGDRVAVRVARADLDDGKIDFVLIAGGSGRGRKVKSSASAKPAGTAGKGKPKTAAEKKTARGGKVRGRGASAAAESRKKAKKPVPIKVKKRKGKS

SEQ ID NO: 4159 - protein, 791 aa, Neisseria
  VARIANT (1)...(791): Xaa = Any Amino Acid
MNKNIKSLNLREKDPFLSREKQRYEHPLPSREWIIELLERKGVPSKIEALVRELSIKEEEYEFFERRLKAMARDGQVLINRRGAVCAADKLDLVKCRVKAHKDRFGFAVPLTPAKDGDFVLYERQMRGIMHGDIVTVRPAGMDGRGRREGTVLDIVERAQSKVVGRFXMDRGVAILEPEDKRLNQSIVLEPDGVARFKPESGQVIVGEIEVYPEQNRPAVAKIIEVLGDYADSGMEIEIAVRKHHLPHQFSEACAKAAKKIPDHVRKSDLKGRVDLRDLPLVTIDGETARDFDDAVFAEKIGRNYRLVVAIADVSHYVRPDDAIDTDAQERSTSVYFPRRVIPMLPENLSNGICSLNPHVERLCVVCDMVITYAGNIKEYRFYPAVMRSHARLTYNQVWKWLSGGIEHPFKTQIDTLYKLFKILQKKRFERGAVEFDSIETQMLFDDNGKIEKIVPVVRNDAHKLIEECMLAANVCAADFLLKNKHTALFRNHLGPTPEKLAALREQLGLLGLQLGGGDNPSPKDYAALAGQFKGRPDAELLQVMMLRSMQQAVYEPHCDGHFGLAYEAYAHFTSPIRRYPDLTVHRAIKAVLNQQTYTPKKSWQALGVHTSFCERRADDASRDVENWLKTYYMRDKVGEVFEGKISGMTSFGIFVTLDGIHIDGLVHISDLGEDYFNFRPEIMAIEGERSGIRFNMGDRVAVRVARADLDDGKIDFVLIAGGSGRGRKVKSSASAKPAGTAGKGKPKTAAEKKTARGGKVRGRGASAAAESRKKAKKPVPIKVKKRKGKS

SEQ ID NO: 4160 - protein, 459 aa, Neisseria
MTPFTLKKTVLLLGTAFAAASVHASGYHFGTQSVNAQSTANAADASTIFYNPAGLTKLDSSQISVNANIVLPSIHYEADSATDFTGLPVQGSKNGKITKTTVAPHIYGAYKVNDNLTVGLGVYVPFGSATEYEKDSVLRHNINKLGLTSIAVEPVAAWKLNERHSFGAGIIAQHNSAELRKYADGIPKKAQMLQATPSNPTAAAQIKADGHADVKGSDWGVGYQLAWMWDINDRARVGVNYRSKVSHTLKGDAEWAADGAAAKQQWNDNMLTPLGYTANEKASVKIVTPESLSVHGMYKVSDKADLFGDVTWTRHSRFNKAELFFEKEKNIANGKKSDRTTITPNWRNTYKVGLGGSYQISEPLQLRVGIAFDKPPVRNADYRMNSLPDGNRIWFSAGMKYHIGKNHVVDAAYTHIHINDTSYRTAKASGNDVDSKGASCARFKNHADIIGLQYTYKFK

SEQ ID NO: 4161 - protein, 466 aa, Neisseria; identical to SEQ ID NO: 684

SEQ ID NO: 4162 - protein, 1083 aa, Neisseria
MTPSALKKTVLLLGTAFAAASAQASGYHFGTQSVNAQSTANAAAAEAADASTIFYNPAGLTKLDSSQISVNANIVLPSIHYEADSATDFTGLPVQGSKSGKITKTTVAPHIYGAYKVNDNLTVGLGVYVPFGSATEYEKDSVLRHNINKLGLTSIAVEPVAAWKLNERHSFGAGIIAQHTSAELRKYADWGIMEKAKALKETPPNPTKAAQIKADGHADVKGSDWGFGYQLAWMWDINDRARVGVNYRSKVSHTLKGDAEWAADDAMAKQLWDANKLALLGYTPSEKARVKIVTPESLSVHGMYKVSDKADLFGDVTWTRHSRFDKAELVFEKEKTIVNGKSDRTTITPNWRNTYKVGFGGSYQISEPLQLRAGIAFDKSPVRNADYRMNSLPDGNRIWFSAGMKYHIGKNHVVDAAYTHIHINDTSYRTAKASGNDVDSKGASSARFKNHADIIGLQYTYKFKMFRAQLGSNTRSTKIGDDADFSFSDKPKPGTSHYFSSGKTDQNSSEYGYDEINIQGKNYNSGILAVDNMPVVKKYITEKYGADLKQAVKSQLQDLYKTRPEAWAENKKRTEEAYIAQFGTKFSTLKQTMPDLINKLVEDSVLTPHSNTSQTSLNNIFNKKLHVKIENKSHVAGQVLELTKMTLKDSLWEPRRHSDIHTLETSDNARIRLNTKDEKLTVHKDYAGGADFLFGYDVRESDEPALTFEDKVSGQSGVVLERRPENLKTLDGRKLIAAKTADSGSFAFKQNYRQGLYELLLKQCEGGFCLGVQRLAIPEAEAVLYAQQAYAANTLFGLRAADRGDDVYAADPSRQKLWLRFIGGRSHQNIRGGAAADGWRKGVQIGGEVFVRQNEGSRLAIGVMGGRAGQHASVNGKGGAAGSDLYGYGGGVYAAWHQLRDKQTGAYLDGWLQYQRFKHRINDENRAERYKTKGWTASVEGGYNALVAEGIVGKGNNVRFYLQPQAQFTYLGVNGGFTDSEGTAVGLLGSGQWQSRAGIRAKTRFALRNGVNLQPFAAFNVLHRSKSFGVEMDGEKQTLAGRTALEGRFGIEAGWKGHMSARIGYGKRTDGDKEAALSLKWLF

SEQ ID NO: 4163 - protein, 619 aa, Neisseria; identical to SEQ ID NO: 227

SEQ ID NO: 4164 - protein, 233 aa, Neisseria
MFRRHRHLKNMQIKKIMKWLPVALSLLGALGYTGYDSEAVRTAVAVLDVLGTAGDVGFDAPVRRRASAKSGHSYTGTVSKVYDGDTLHVIDGDGAKHKIRMAYIDAPEMKQAYGTRSRDNLRAAAEGRKVSVRVFETDRYQREVAQVSAGKTDLNLMQVQDGAAWHYKSYAKEQQDKADFADYADAQIQAERERKGLWKAKNPQAPWAYRRAGRSGGGNKDWMDSVGEWLGIW

SEQ ID NO: 4165 - protein, 233 aa, Neisseria; identical to SEQ ID NO: 2047

SEQ ID NO: 4166 - protein, 233 aa, Neisseria; identical to SEQ ID NO: 2047

SEQ ID NO: 4167 - protein, 248 aa, Neisseria
LKVVLGSFQGPLDLLLYLIRKQNIDVLDIPMVEITGQYLHYIAQMEAYQFDLAAEYLLMAAMLIEIKSRLLLPRTEAVEDEEADPRAELVRRLLAYEQMKLAAQGLDALPRAGRDFAWAYLPLEIAAETKLPEVYIADLMQAWLGILSRAKHTRSHEVIQETLSVRAQMTAILRRLNEHGICRFHALFNPEQGAAYVIVNFIALLELAKEGLVGIVQEDGFGEIRISLNHEGAHSDGIFGTRGGRDVF

SEQ ID NO: 4168 - protein, 248 aa, Neisseria
LKVVLGSFQGPLDLLLYLIRKQNIDVLDIPMVKITEQYLHYIAQIETYQFDLAAEYLLMAAMLIEIKSRLLLPRTETVEDEEADPRAELVRRLLAYEQMKLAAQGLDALPRAGRDFAWAYLPLEIAVEAKLPEVYITDLTQAWLGILSRAKHTRSHEVIKETISVRAQMTAILRRLNGHGICRFHDLFNPKQGAAYVVVNFIALLELAKEGLVRIVQEDGFGEIRISLNHEGAHSDGISGTRGGRDVF

SEQ ID NO: 4169 - protein, 248 aa, Neisseria
LKVVLSSFQGPLDLLLYLIRKQNIDVLDIPMVKITEQYLHYIAQIETYQFDLAAEYLLMAAMLIEIKSRLLLPRTETVEDEEADPRAELVRRLLAYEQMKLAAQGLDALPRAGRDFAWAYLPLEIAVEAKLPEVYITDLTQAWLSILSRAKHTRSHEVIKETISVRAQMTAILRRLNKHGICRFHDLFNPEQGAAYVVVNFIALLELAKEGLVGIVQEVGFGEIRISLNHEGAHSDGISGTRGGRDVF

SEQ ID NO: 4170 - protein, 200 aa, Neisseria
MNRRTFLLGAGALLLTACGRKSARTHAKIPEGSTVLALGDSLTFGYGANPGESYPAQLQKLTGWNIVNGGVSGDTSAQALSRLPALLARKPKLVIVGIGGNDFLRKVPEEQTRANIAKIIETVQKENIPAVLVGVPHITLGALFGHLSDHPLYEDLSEEYGIPLFGGAWAEILGNNNLKSDQIHANGKGYRKFAENLNQF

SEQ ID NO: 4171 - protein, 207 aa, Neisseria
MNRRTFLLGAGALLLTACGRKSARTHAKIPEGSTVLALGDSLTFGYGANPGESYPAQLQKLTGWNIVNGGVSGDTSAQALSRLPALLARKPKLVIVGIGGNDFLRKVPKEQTRANIAKIIETVQKENIPAVLVGVPHITLGALFGHLSDHPLYEDLSEEYGIPLFGGAWAEILGDNNLKSDQIHANGKGYRKFAEDLNQFLRKQGFR

SEQ ID NO: 4172 - protein, 207 aa, Neisseria; identical to SEQ ID NO: 4171

SEQ ID NO: 4173 - protein, 351 aa, Neisseria
MMNTPHPRPKIAVIGAGWAGLSAAVTLARHADVTLFEAGRQAGGRARTLAGNTDGFGFLDNGQHILLGAYRGVLRLMKTIGSDPRAAFLRVPLHWHMHGGLQFRALPLPAPLHILGGVLLARRVPSAFKAKLLADMSDLQKSARLGQPDTTVAQWLKQRNVPRAAVMQFWQPLVWGALNTPLETASLRVLCNVLSDGVLTKKSGSDYLLPKQDLGAIVAEPALAELQRLGADIRLETRVCRLNTLPDGKVLVNGEAFDAAILATAPYHAAALLPEGTPEHVQTAYQNLRYHAITTVYLRYAEPVRLPAPLTGIADGTAQWLLCPGQAPDCPQNEVSAVISVSDRVGAFANR

SEQ ID NO: 4174 - protein, 437 aa, Neisseria; identical to SEQ ID NO: 1686

SEQ ID NO: 4175 - protein, 437 aa, Neisseria
MMNTPHPRPKIAVIGAGWAGLSAAVTLARHADVTLFEAGRQAGGRARALAGNTDGFGFLDNGQHILLGAYRGVLRLMKTIGSDPHAAFLRVPLHWHMHGGLQFRALPLPAPLHILGGVLLARRVPSAFKAKLLADMSDLQKSARLGQPDTTVAQWLKQRNVPRAAVMQFWQPLVWGALNTPLETASLRVLCNVLSDGVLTKKSGSDYLLPKQDLGAIVAEPALAELQRLGADIRLETRICRLNTLPDGKVLVNGEPFDAAVPATAPYHAAALLPEGTPEHVQTAYQNLRYHAITTVYLRYAEPVRLPAPLTGLADGTVQWLLCRGRLGLPENEVSAVISVSDRVGAFANRAWADKVHADLKRILPHLGEPEAVRVITEKRATTAADAPPPDLSWLHRHRIFPAGDYLHPDYPATLEAAVQSGFASAEACLQSLSDAV

SEQ ID NO: 4176 - protein, 200 aa, Neisseria; identical to SEQ ID NO: 1668

SEQ ID NO: 4177 - protein, 152 aa, Neisseria; identical to SEQ ID NO: 3241

SEQ ID NO: 4178 - protein, 152 aa, Neisseria; identical to SEQ ID NO: 3240

SEQ ID NO: 4179 - protein, 152 aa, Neisseria; identical to SEQ ID NO: 3242
  VARIANT (1)...(152): Xaa = Any Amino Acid

SEQ ID NO: 4180 - protein, 199 aa, Neisseria; identical to SEQ ID NO: 3391

SEQ ID NO: 4181 - protein, 316 aa, Neisseria; identical to SEQ ID NO: 3390

SEQ ID NO: 4182 - protein, 315 aa, Neisseria; identical to SEQ ID NO: 3392

SEQ ID NO: 4183 - protein, 315 aa, Neisseria; identical to SEQ ID NO: 1776

SEQ ID NO: 4184 - protein, 315 aa, Neisseria; identical to SEQ ID NO: 3393

SEQ ID NO: 4185 - protein, 315 aa, Neisseria; identical to SEQ ID NO: 3392

SEQ ID NO: 4186 - protein, 222 aa, Neisseria; identical to SEQ ID NO: 3536

SEQ ID NO: 4187 - protein, 215 aa, Neisseria; identical to SEQ ID NO: 3535

SEQ ID NO: 4188 - protein, 272 aa, Neisseria; identical to SEQ ID NO: 3537

SEQ ID NO: 4189 - protein, 272 aa, Neisseria; identical to SEQ ID NO: 2103

SEQ ID NO: 4190 - protein, 272 aa, Neisseria; identical to SEQ ID NO: 3538

SEQ ID NO: 4191 - protein, 272 aa, Neisseria; identical to SEQ ID NO: 3537

SEQ ID NO: 4192 - protein, 441 aa, Neisseria; identical to SEQ ID NO: 634

SEQ ID NO: 4193 - protein, 441 aa, Neisseria; identical to SEQ ID NO: 4062

SEQ ID NO: 4194 - protein, 441 aa, Neisseria; identical to SEQ ID NO: 4064

SEQ ID NO: 4195 - protein, 366 aa, Neisseria; identical to SEQ ID NO: 2887
  VARIANT (1)...(366): Xaa = Any Amino Acid

SEQ ID NO: 4196 - protein, 366 aa, Neisseria; identical to SEQ ID NO: 2886

SEQ ID NO: 4197 - protein, 366 aa, Neisseria; identical to SEQ ID NO: 2888

SEQ ID NO: 4198 - protein, 366 aa, Neisseria; identical to SEQ ID NO: 2889
  VARIANT (1)...(366): Xaa = Any Amino Acid

SEQ ID NO: 4199 - protein, 366 aa, Neisseria; identical to SEQ ID NO: 2888

SEQ ID NO: 4200 - protein, 426 aa, Neisseria
  VARIANT (1)...(426): Xaa = Any Amino Acid
NTVEPLTGITERVGRIWGVVSHLNCVADTPELRAVYNELMPEITVFFTEIGQDIELYNRFKTIKNSPEFDTLSPAQKTKLNHYASEKLREAKYAFSETXVKKYFPVGXVLNGLFAQXKKLYGIGFTEKTVPVWHKDVRYXELQQNGEXIGGVYMDLYAREGKRGGAWMNDYKGRRRFSDGTLQLPTAYLVCNFAPPVGGREARLSHDEILILFHETGHGLHHLLTQVDELGVSGINGVXWDAVELPSQFMENFVWEYNVLAQXSAHEETGVPLPKELXDKXLAAKNFQXGMFXVRQXEFALFDMMIYSEDDEGRLKNWQQVLDSVRKKVAVIQPPEYNRFALSFGHIFAGGYSAAXYSYAWAEVLSADAYAAFEESDDVAATGKRFWQEILAVGXSRSGAESFKAFRGREPSIDALLRHSGFDNAV

SEQ ID NO: 4201 - protein, 678 aa, Neisseria; identical to SEQ ID NO: 2908

SEQ ID NO: 4202 - protein, 678 aa, Neisseria; identical to SEQ ID NO: 2910

SEQ ID NO: 4203 - protein, 678 aa, Neisseria; identical to SEQ ID NO: 805

SEQ ID NO: 4204 - protein, 491 aa, Neisseria; identical to SEQ ID NO: 2911

SEQ ID NO: 4205 - protein, 678 aa, Neisseria; identical to SEQ ID NO: 2910

SEQ ID NO: 4206 - protein, 177 aa, Neisseria; identical to SEQ ID NO: 3026
  VARIANT (1)...(177): Xaa = Any Amino Acid

SEQ ID NO: 4207 - protein, 177 aa, Neisseria; identical to SEQ ID NO: 3025

SEQ ID NO: 4208 - protein, 177 aa, Neisseria; identical to SEQ ID NO: 1975

SEQ ID NO: 4209 - protein, 488 aa, Neisseria; identical to SEQ ID NO: 538

SEQ ID NO: 4210 - protein, 429 aa, Neisseria; identical to SEQ ID NO: 3267

SEQ ID NO: 4211 - protein, 497 aa, Neisseria; identical to SEQ ID NO: 3269

SEQ ID NO: 4212 - protein, 320 aa, Neisseria; identical to SEQ ID NO: 40

SEQ ID NO: 4213 - protein, 320 aa, Neisseria; identical to SEQ ID NO: 42

SEQ ID NO: 4214 - protein, 320 aa, Neisseria; identical to SEQ ID NO: 41

SEQ ID NO: 4215 - protein, 280 aa, Neisseria
MDSFFKPAVWAVLWLMFAVRPALADELTNLLSSREQILRQFAEDEQPVLPINRAPARRAGNADELIGSAMGLNEQPVLPVNRVPARRAGNADELIGNAMGLNEQPVLPVNRVPARRAGNADELIGNAMGLNEQPVLPVNRAPARRAGNADELIGNAMGLLGIAYRYGGTSISTGFDCSGFMQHIFKRAMGINLPRTSAEQARMGTPVARSELQPGDMVFFRTLGGSRISHVGLYIGNNRFIHAPRTGKNIEITSLSHKYWSGKYAFARRVKKNDPSRFLN

SEQ ID NO: 4216 - protein, 251 aa, Neisseria
MDSFFKPAVWAVLWLMFAVRPALADELTNLLSSREQILRQFAEDEQPVLPINRAPARRAGNADELIGSAMGLNEQPVLPVNRVPARRAGNADELIGNAMGLNEQPVLPVNRAPARRAGNADELIGNAMGLLGIAYRYGGTSISTGFDCSGFMQHIFKRAMGINLPRTSAEQARMGTPVARSELQPGDMVFFRTLGGSRISHVGLYIGNNRFIHAPRTGKNIEITSLSHKYWSGKYAFARRVKKNDPSRFLN

SEQ ID NO: 4217 - protein, 251 aa, Neisseria; identical to SEQ ID NO: 2517

SEQ ID NO: 4218 - protein, 251 aa, Neisseria
MDSFFKPAVWAVLWLMFAVRLALADELTNLLSSREQILRQFAEDEQPVLPINRAPARRAGNADELIGSAMGLNEQPVLPVNRVPARRAGNADELIGNAMGLNEQPVLPVNRAPARRAGNADELIGNAMGLLGIAYRYGGTSVSTGFDCSGFMQHIFKRAMGINLPRTSAEQARMGTPVARSELQPGDMVFFRTLGGSRISHVGLYIGNNRFIHAPRTGKNIEITSLSHKYWSGKYAFARRVKKNDPSRFLN

SEQ ID NO: 4219 - protein, 251 aa, Neisseria; identical to SEQ ID NO: 2517

SEQ ID NO: 4220 - protein, 251 aa, Neisseria
MDSFFKPAVWAVLWLMFAVRPALADELTNLLSSREQILRQFAEDEQPVLPINRAPARRAGNADELIGSAMGLNEQPVLPVNRVPARRAGNADELIGSAMGLNEQPVLPVNRAPARRAGNADELIGNAMGLLGIAYRYGGTSISTGFDCSGFMQHIFKRAMGINLPRTSAEQARMGTPVARSELQPGDMVFFRTLGGSRISHVGLYIGNNRFIHAPRTGKNIEITSLSHKYWSGKYAFARRVKKNDPSRFLN

SEQ ID NO: 4221 - protein, 251 aa, Neisseria; identical to SEQ ID NO: 2517

SEQ ID NO: 4222 - protein, 251 aa, Neisseria; identical to SEQ ID NO: 2517

SEQ ID NO: 4223 - protein, 251 aa, Neisseria; identical to SEQ ID NO: 4220

SEQ ID NO: 4224 - protein, 251 aa, Neisseria; identical to SEQ ID NO: 4216

SEQ ID NO: 4225 - protein, 251 aa, Neisseria; identical to SEQ ID NO: 2517

SEQ ID NO: 4226 - protein, 280 aa, Neisseria
MDSFFKPAVWAVLWLMFAVRPALADELTNLLSSREQILRQFAEDEQPVLPINRAPARRAGNADELIGSAMGLNEQPVLPVNRVPARRAGNADELIGNAMGLNEQPVLPVNRAPARRAGNADELIGNAMGLNEQPVLPVNRAPARRAGNADELIGNAMGLLGIAYRYGGTSVSTGFDCSGFMQHIFKRAMGINLPRTSAEQARMGTPVARSELQPGDMVFFRTLGGSRISHVGLYIGNNRFIHAPRTGKNIEITSLSHKYWSGKYAFARRVKKNDPSRFLN

SEQ ID NO: 4227 - protein, 251 aa, Neisseria; identical to SEQ ID NO: 4216

SEQ ID NO: 4228 - protein, 251 aa, Neisseria
MDSFFKPAVWAVLWLMFAVRPALADELTNLLSSREQILRQFAEDEQPVLPVNRAPARRAGNADELIGSAMGLNEQPVLPVNRVPARRAGNADELIGNAMGLNEQPVLPVNRAPARRAGNADELIGNAMGLLGIAYRYGGTSVSTGFDCSGFIQHIFKRAMGINLPRTSAEQARMGTPVARSELQPGDMVFFRTLGGSRISHVGLYIGNNRFIHAPRTGKNIEITSLSHKYWSGKYAFARRVKKNDPSRFLN

SEQ ID NO: 4229 - protein, 251 aa, Neisseria; identical to SEQ ID NO: 2517

SEQ ID NO: 4230 - protein, 222 aa, Neisseria
MDSFFKPAVWAVLWLMFAVRPALADELTNLLSSREQILRQFAEDEQPVLPINRAPARRAGNADELIGSAMGLNEQPVLPVNRVPARRAGNADELIGNAMGLLGIAYRYGGTSVSTGFDCSGFMQHIFKRAMGINLPRTSAEQARMGTPVARSELQPGDMVFFRTLGGSRISHVGLYIGNNRFIHAPRTGKNIEITSLSHKYWSGKYAFARRVKKNDPSRFLN

SEQ ID NO: 4231 - protein, 251 aa, Neisseria; identical to SEQ ID NO: 2517

SEQ ID NO: 4232 - protein, 251 aa, Neisseria; identical to SEQ ID NO: 2517

SEQ ID NO: 4233 - protein, 251 aa, Neisseria; identical to SEQ ID NO: 2517

SEQ ID NO: 4234 - protein, 251 aa, Neisseria; identical to SEQ ID NO: 2517

SEQ ID NO: 4235 - protein, 280 aa, Neisseria
MDSFFKPAVWAVLWLMFAVRPALADELTNLLSSREQILRQFAEDEQPVLPINRAPARRAGNADELIGSAMGLNEQPVLPINRAPARRAGNADELIGSAMGLNEQPVLPVNRVPARRAGNADELIGNAMGLNEQPVLPVNRAPARRAGNADELIGNAMGLLGIAYRYGGTSVSTGFDCSGFMQHIFKRAMGINLPRTSAEQARMGTPVARSELQPGDMVFFRTLGGSRISHVGLYIGNNRFIHAPRTGKNIEITSLSHKYWSGKYAFARRVKKNDPSRFLN

SEQ ID NO: 4236 - protein, 251 aa, Neisseria; identical to SEQ ID NO: 2517

SEQ ID NO: 4237 - protein, 251 aa, Neisseria; identical to SEQ ID NO: 4216

SEQ ID NO: 4238 - protein, 251 aa, Neisseria; identical to SEQ ID NO: 4216

SEQ ID NO: 4239 - protein, 251 aa, Neisseria; identical to SEQ ID NO: 4216

SEQ ID NO: 4240 - protein, 251 aa, Neisseria; identical to SEQ ID NO: 4216

SEQ ID NO: 4241 - protein, 251 aa, Neisseria; identical to SEQ ID NO: 4216

SEQ ID NO: 4242 - protein, 251 aa, Neisseria; identical to SEQ ID NO: 2517

SEQ ID NO: 4243 - protein, 251 aa, Neisseria; identical to SEQ ID NO: 2517

SEQ ID NO: 4244 - protein, 251 aa, Neisseria; identical to SEQ ID NO: 2517

SEQ ID NO: 4245 - protein, 222 aa, Neisseria
MDSFFKPAVWAVLWLMFAVRPALADELTNLLSSREQILRQFAEDEQPVLPVNRAPARRAGNADELIGSAMGLNEQPVLPVNRAPARRAGNADELIGSAMGLLGIAYRYGGTSVSTGFDCSGFMQHIFKRAMGINLPRTSAEQARMGAPVARSELQPGDMVFFRTLGGSRISHVGLYIGNNRFIHAPRTGKNIEITSLSHKYWSGKYAFARRVKKNDPSRFLN

SEQ ID NO: 4246 - protein, 222 aa, Neisseria
MDSFFKPAVWAVLWLMFAVRSALADELTNLLSSREQILRQFAEDEQPVLPVNRAPARRAGNADELIGSAMGLNEQPVLPVNRAPARRAGNADELIGSAMGLLGIAYRYGGTSVSTGFDCSGFMQHIFKRAMGINLPRTSAEQARMGAPVARSELQPGDMVFFRTLGGSRISHVGLYIGNNRFIHAPRTGKNIEITSLSHKYWSGKYAFARRIKKNDPSRFLN

SEQ ID NO: 4247 - protein, 251 aa, Neisseria; identical to SEQ ID NO: 4216

SEQ ID NO: 4248 - protein, 215 aa, Neisseria; identical to SEQ ID NO: 3102

SEQ ID NO: 4249 - protein, 215 aa, Neisseria
MKPLILGLAAVLALSACQVQKAPDFDYTSFKESKPASILVVPPLNESPDVNGTWGVLASTAAPLSEAGYYVFPAAVVEETFKENGLTNAADIHAVRPEKLHQIFGNDAVLYITVTEYGTSYQILDSVTTVSAKARLVDSRNGKELWSGSASIREGSNNSNSGLLGALVSAVVNQIANNLTDRGYQVSKTAAYNLLSPYSHNGILKGPRFVEEQPK

SEQ ID NO: 4250 - protein, 215 aa, Neisseria; identical to SEQ ID NO: 1682

SEQ ID NO: 4251 - protein, 215 aa, Neisseria; identical to SEQ ID NO: 1682

SEQ ID NO: 4252 - protein, 215 aa, Neisseria; identical to SEQ ID NO: 1682

SEQ ID NO: 4253 - protein, 215 aa, Neisseria; identical to SEQ ID NO: 4249

SEQ ID NO: 4254 - protein, 215 aa, Neisseria; identical to SEQ ID NO: 1682

SEQ ID NO: 4255 - protein, 215 aa, Neisseria; identical to SEQ ID NO: 4249

SEQ ID NO: 4256 - protein, 215 aa, Neisseria
MKPLILGLAAALVLSACQVQKAPDFDYTSFKESKPASILVVPPLNESPDVNGTWGMLASTAEPLSEAGYYVFPAAVVEETFKQNGLTNAADIHAVQPEKLHQIFGNDAVLYITITEYGTSYQILDSVTTVSARARLVDSRNGKVLWSGSASIREGSNNSNSGLLGALVSAVVNQIANSLTDRGYQVSKTAAYNLLSPYSHNGILKGPRFVEEQPK

SEQ ID NO: 4257 - protein, 215 aa, Neisseria; identical to SEQ ID NO: 1682

SEQ ID NO: 4258 - protein, 215 aa, Neisseria; identical to SEQ ID NO: 1682

SEQ ID NO: 4259 - protein, 215 aa, Neisseria; identical to SEQ ID NO: 1682

SEQ ID NO: 4260 - protein, 215 aa, Neisseria
MKPLILGLAAVLALSACQVQKAPDFDYTSFKESKPASILVVPPLNESPDVNGTWGVLASTAAPLSEAGYYVFPAAVVEETFKQNGLTNAADIHAVRPEKLHQIFGNDAVLYITVTEYGTSYQILDSVTTVSAKARLVDSRNGKELWSGSASIREGSNNSNSGLLGALVGAVVNQIANSLTDRGYQVSKTAAYNLLSPYSHNGILKGPRFVEEQPK

SEQ ID NO: 4261 - protein, 215 aa, Neisseria; identical to SEQ ID NO: 1682

SEQ ID NO: 4262 - protein, 215 aa, Neisseria; identical to SEQ ID NO: 1682

SEQ ID NO: 4263 - protein, 215 aa, Neisseria; identical to SEQ ID NO: 1682

SEQ ID NO: 4264 - protein, 215 aa, Neisseria; identical to SEQ ID NO: 4260

SEQ ID NO: 4265 - protein, 215 aa, Neisseria; identical to SEQ ID NO: 1682

SEQ ID NO: 4266 - protein, 215 aa, Neisseria; identical to SEQ ID NO: 1682

SEQ ID NO: 4267 - protein, 215 aa, Neisseria; identical to SEQ ID NO: 1682

SEQ ID NO: 4268 - protein, 215 aa, Neisseria; identical to SEQ ID NO: 1682

SEQ ID NO: 4269 - protein, 215 aa, Neisseria; identical to SEQ ID NO: 1682

SEQ ID NO: 4270 - protein, 215 aa, Neisseria
MKPLILGLAAVLALSACQVQKAPDFDYTSFKESKPASILVVPPLNESPDVNGTWGMLASTAAPLSEAGYYVFPAAVVEETFKQNGLTNAADIHAVRPEKLHQIFGNDAVLYITVTEYGTSYQILDSVTTVSAKARLVDSRNGKELWSGSASIREGSNNSNSGLLGALVGAVVNQIANSLTDRGYQVSKTAAYNLLSPYSHNGILKGPRFVEEQPK

SEQ ID NO: 4271 - protein, 215 aa, Neisseria; identical to SEQ ID NO: 1682

SEQ ID NO: 4272 - protein, 215 aa, Neisseria; identical to SEQ ID NO: 1682

SEQ ID NO: 4273 - protein, 215 aa, Neisseria; identical to SEQ ID NO: 1682

SEQ ID NO: 4274 - protein, 215 aa, Neisseria
MKPLILGLAAVLALSACQVQKAPDFDYTAFKESKPASILVVPPLNESPDVNGTWGMLASTAEPLSEAGYYVFPAAVVEETFKQNGLTNAADIHAVRPEKLHQIFGNDAVLYITITEYGTSYQILDSVTTVSARARLVDSRNGKVLWSGSASIREGSNNSNSGLLGALVGAVVNQIANSLTDRGYQVSKAAAYDLLSPYSHNGILKGPRFVEEQPK

SEQ ID NO: 4275 - protein, 215 aa, Neisseria; identical to SEQ ID NO: 3102

SEQ ID NO: 4276 - protein, 215 aa, Neisseria; identical to SEQ ID NO: 3102

SEQ ID NO: 4277 - protein, 215 aa, Neisseria; identical to SEQ ID NO: 1682

SEQ ID NO: 4278 - protein, 492 aa, Neisseria
MFKRSVIAMACIFALSACGGGGGGSPDVKSADTLSKPAAPVVSEKETEAKEDAPQAGSQGQGAPSAQGGQDMAAVSEENTGNGGAAATDKPKNEDEGAQNDMPQNAADTDSLTPNHTPASNMPAGNMENQAPDAGESEQPANQPDMANTADGMQGDDPSAGGENAGNTAAQGTNQAENNQTAGSQNPASSTNPSATNSGGDFGRTNVGNSVVIDGPSQNITLTHCKGDSCSGNNFLDEEVQLKSEFEKLSDADKISNYKKDGKNDGKNDKFVGLVADSVQMKGINQYIIFYKPKPTSFARFRRSARSRRSLPAEMPLIPVNQADTLIVDGEAVSLTGHSGNIFAPEGNYRYLTYGAEKLPGGSYALRVQGEPSKGEMLAGTAVYNGEVLHFHTENGRPSPSRGRFAAKVDFGSKSVDGIIDSGDGLHMGTQKFKAAIDGNGFKGTWTENGGGDVSGKFYGPAGEEVAGKYSYRPTDAEKGGFGVFAGKKEQD

SEQ ID NO: 4279 - protein, 492 aa, Neisseria; identical to SEQ ID NO: 4278

SEQ ID NO: 4280 - protein, 488 aa, Neisseria; identical to SEQ ID NO: 538

SEQ ID NO: 4281 - protein, 497 aa, Neisseria; identical to SEQ ID NO: 3269

SEQ ID NO: 4282 - protein, 429 aa, Neisseria; identical to SEQ ID NO: 3267

SEQ ID NO: 4283 - protein, 488 aa, Neisseria; identical to SEQ ID NO: 538

SEQ ID NO: 4284 - protein, 315 aa, Neisseria; identical to SEQ ID NO: 3393

SEQ ID NO: 4285 - protein, 315 aa, Neisseria; identical to SEQ ID NO: 3392

SEQ ID NO: 4286 - protein, 315 aa, Neisseria; identical to SEQ ID NO: 1776

SEQ ID NO: 4287 - protein, 315 aa, Neisseria
MEFFIILLVAVAVFGFKSFVVIPQQEVHVVERLGRFHRALTAGLNILIPFIDRVAYRHSLKEIPLDVPSQVCITRDNTQLTVDGIIYFQVTDPKLASYGSSNYIMAITQLAQTTLRSVIGRMELDKTFEERDEINSTVVSALDEAAGAWGVKVLRYEIKDLVPPQEILRSMQAQITAEREKRARIAESEGRKIEQINLASGQREAEIQQSEGEAQAAVNASNAEKIARINRAKGEAESLRLVAEANAEAIRQIAAALQTQGGADAVNLKIAEQYVAAFNNLAKESNTLIMPANVADIGSLISAGMKIIDSSKTAK

SEQ ID NO: 4288 - protein, 315 aa, Neisseria; identical to SEQ ID NO: 4287

SEQ ID NO: 4289 - protein, 315 aa, Neisseria; identical to SEQ ID NO: 4287

SEQ ID NO: 4290 - protein, 315 aa, Neisseria; identical to SEQ ID NO: 4287

SEQ ID NO: 4291 - protein, 315 aa, Neisseria
MEFFIILLVAVAVFGFKSFVVIPQQEVHVVERLGRFHRALTAGLNILIPFIDRVAYRHSLKEIPLDVPSQVCITRDNTQLTVDGIIYFQVTDPKLASYGSSNYIMAITQLAQTTLRSVIGRMELDKTFEERDEINSTVFSALDEAAGAWGVKVLRYEIKDLVPPQEILRSMQAQITAERKKRARIAESEGRKIEQINLASGQREAEIQQSEGEAQAAVNASNAEKIARINRAKGEAESLRLVAEANAEAIRQIAAALQTQGGADAVNLKIAEQYVAAFNNLAKESNTLIMPANVADIGSLISAGMKIIDSSKTAK

SEQ ID NO: 4292 - protein, 315 aa, Neisseria; identical to SEQ ID NO: 1776

SEQ ID NO: 4293 - protein, 315 aa, Neisseria
MEFFIILLAAVAVFGFKSFVVIPQQEVHVVERLGRFHRALTAGLNILIPFIDRVAYRHSLKEIPLDVPSQVCITRDNTQLTVDGIIYFQVTDPKLASYGSSNYIMAITQLAQTTLRSVIGRMELDKTFEERDEINSTVVAALDEAAGAWGVKVLRYEIKDLVPPQEILRSMQAQITAEREKRARIAESEGRKIEQINLASGQREAEIQQSEGEAQAAVNASNAEKIARINRAKGEAESLRLVAEANAEAIRQIAAALQTQGGADAVNLKIAEQYVAAFNNLAKESNTLIMPANVADIGSLISAGMKIIDSSKTAK

SEQ ID NO: 4294 - protein, 315 aa, Neisseria; identical to SEQ ID NO: 1776

SEQ ID NO: 4295 - protein, 315 aa, Neisseria; identical to SEQ ID NO: 1776

SEQ ID NO: 4296 - protein, 315 aa, Neisseria; identical to SEQ ID NO: 1776

SEQ ID NO: 4297 - protein, 315 aa, Neisseria
MEFFIILLVAVAVFGFKSFVVIPQQEVHVVERLGRFHRALTAGLNILIPFIDRVAYRHSLKEIPLDVPSQVCITRDNTQLTVDGIIYFQVTDPKLASYGSSNYIMAITQLAQTTLRSVIGRMELDKTFEERDEINSTVVAALDEAAGAWGVKVLRYEIKDLVPPQEILRSMQAQITAEREKRARIAESEGRKIEQINLASGQREAEIQQSEGEAQAAVNASNAEKIARINRAKGEAESLRLVAEANAEAIRQIAAALQTQGGADAVNLKIAEQYVAAFNNLAKESNTLIMPANVADIGSMISAGMKIIDSSKTAK

SEQ ID NO: 4298 - protein, 315 aa, Neisseria; identical to SEQ ID NO: 1776

SEQ ID NO: 4299 - protein, 315 aa, Neisseria
MEFFIILLAAVVVFGFKSFVVIPQQEVHVVERLGRFHRALTAGLNILIPFIDRVAYRHSLKEIPLDVPSQVCITRDNTQLTVDGIIYFQVTDPKLASYGSSNYIMAITQLAQTTLRSVIGRMELDKTFEERDEINSTVVSALDEAAGAWGVKVLRYEIKDLVPPQEILRSMQAQITAEREKRARIAESEGRKIEQINLASGQREAKIQQSEGEAQAAVNASNAEKIARINRAKGEAESLRLVAEANAEAIRQIAAALQTQGGADAVNLKIAEQYVAAFNNLAKESNTLIMPANVADIGSLISAGMKIIDSSKTAK

SEQ ID NO: 4300 - protein, 315 aa, Neisseria
MEFFIILLAAVVVFGFKSFVVIPQQEVHVVERLGRFHRALTAGLNILIPFIDRVAYRHSLKEIPLDVPSQVCITRDNTQLTVDGIIYFQVTDPKLASYGSSNYIMAITQLAQTTLRSVIGRMELDKTFEERDEINSTVVAALDEAAGAWGVKVLRYEIKDLVPPQEILRSMQAQITAEREKRARIAESEGRKIEQINLASGQREAEIQQSEGEAQAAVNASNAEKIARINRAKGEAESLRLVAEANAEAIRQIAAALQTQGGADAVNLKIAEQYVAAFNNLAKESNTLIMPANVADIGSLISAGMKIIDSSKTAK

SEQ ID NO: 4301 - protein, 315 aa, Neisseria; identical to SEQ ID NO: 1776

SEQ ID NO: 4302 - protein, 315 aa, Neisseria; identical to SEQ ID NO: 4293

SEQ ID NO: 4303 - protein, 315 aa, Neisseria
MEFFIILLAAVAVFGFKSFVVIPQQEVHVVERLGRFHRALTAGLNILIPFIDRVAYRHSLKEIPLDVPSQVCITRDNTQLTVDGIIYFQVTDPKLASYGSSNYIMAITQLAQTTLRSVIGRMELDKTFEERDEINSIVVSALDEAAGAWGVKVLRYEIKDLVPPQEILRSMQAQITAEREKRARIAESEGRKIEQINLASGQREPEIQQSEGEAQAAVNASNAEKIARINRAKGEAESLRLVAEANAEAIRQIAAALQTQGGADAVNLKIAEQYVAAFNNLAKESNTLIMPANVADIGSLISAGMKIIDSNKTAK

SEQ ID NO: 4304 - protein, 315 aa, Neisseria; identical to SEQ ID NO: 3393

SEQ ID NO: 4305 - protein, 315 aa, Neisseria; identical to SEQ ID NO: 4293

SEQ ID NO: 4306 - protein, 441 aa, Neisseria; identical to SEQ ID NO: 4062

SEQ ID NO: 4307 - protein, 441 aa, Neisseria; identical to SEQ ID NO: 4064

SEQ ID NO: 4308 - protein, 441 aa, Neisseria; identical to SEQ ID NO: 634

SEQ ID NO: 4309 - protein, 441 aa, Neisseria; identical to SEQ ID NO: 634

SEQ ID NO: 4310 - protein, 441 aa, Neisseria; identical to SEQ ID NO: 634

SEQ ID NO: 4311 - protein, 441 aa, Neisseria
MKKYLFRAALCGIAAAILAACQSKSIQTFPQPDTSVINGPDRPVGIPAPAGTTVAGGGAVYTVVPHLSLPHWAAQDFAKSLQSFRLGCANLKNRQGWQDVCAQAFQTPVHSFQAKQFFERYFTPWQVAGNGSLAGTVTGYYEPVLKGDDRRTAQARFPIYGIPDDFISVPLPAGLRSGKALVRIRQTGKNSGTIDNAGGTHTADLSRFPITARTTAIKGRFEGSRFLPYHTRNQINGGALDGKAPILGYAEDPVELFFMHIQGSGRLKTPSGKYIRIGYADKNEHPYVSIGRYMADKGYLKLGQTSMQGIKAYMQQNPQRLAEVLGQNPSYIFFRELTGSSNDGPVGALGTPLMGEYAGAVDRHYITLGAPLFVATAHPVTRKALNRLIMAQDTGSAIKGAVRVDYFWGYGDEAGELAGKQKTTGYVWQLLPNGMKPEYRP

SEQ ID NO: 4312 - protein, 441 aa, Neisseria
MKKYLFRAALYGIAAAILAACQSKSIQTFPQPDTSVINGPDRPVGIPDPAGTTVGGGGAVYTVVPHLSLPHWAAQDFAKSLQSFRLSCANLKNRQGWQDVCAQAFQTPVHSFQAKQFFERYFTPWQVAGNGSLAGTVTGYYEPVLKGDDRRTAQARFPIYGIPDDFISVPLPAGLRSGKALVRIRQTGKNSGTIDNTGGTHTADLSRFPITARTTAIKGRFEGSRFLPYHTRNQINGGALDGKAPILGYAEDPVELFFMHIQGSGRLKTPSGKYIRIGYADKNEHPYVSIGRYMADKGYLKLGQTSMQGIKAYMRQNPQRLAEVLGQNPSYIFFRELAGSSNDGPVGALGTPLMGEYAGAVDRHYITLGAPLFVATAHPVTRKALNRLIMAQDTGSAIKGAVRVDYFWGYGDEAGELAGKQKTTGYVWQLLPNGMKPEYRP

SEQ ID NO: 4313 - protein, 441 aa, Neisseria
MKKYLFRAALYGIAAAILAACQSKSIQTFPQPDTSVINGPDRPVGIPDPAGTTVGGGGAVYTVVPHLSLPHWAAQDFAKSLQSFRLGCANLKNRQGWQDVCAQAFQTPVHSFQAKQFFERYFTPWQVAGNGSLAGTVTGYYEPVLKGDDRRTAQARFPIYGIPDDFISVPLPAGLRSGKALVRIRQTGKNSGTIDNTGGTHTADLSRFPITARTTAIKGRFEGSRFLPYHTRNQINGGALDGKAPILGYAEDPVELFFMHIQGSGRLKTPSGKYIRIGYADKNEHPYVSIGKYMADKGYLKLGQTSMQGIKSYMRQNPQRLAEVLGQNPSYIFFRELAGSSNDGPVGALGTPLMGEYAGAVDRHYITLGAPLFVATAHPVTRKALNRLIMAQDTGSAIKGAVRVDYFWGYGDEAGELAGKQKTTGYVWQLLPNGMKPEYRP

SEQ ID NO: 4314 - protein, 441 aa, Neisseria; identical to SEQ ID NO: 634

SEQ ID NO: 4315 - protein, 441 aa, Neisseria; identical to SEQ ID NO: 524

SEQ ID NO: 4316 - protein, 441 aa, Neisseria
MKKYLFRAALCGIAAAILAACQSKSIQTFPQPDTSVINGPDRPVGIPAPAGTTVAGGGAVYTVVPHLSLPHWAAQDFAKSLQSFRLGCANLKNRQGWQDVCAQAFQTPVHSFQAKQFFERYFTPWQVAGNGSLAGTVTGYYEPVLKGDDRRTAQARFPIYGIPDDFISVPLPAGLRSGKALVRIRQTGKNSGTIDNTGGTHTADLSQFPITARTTAIKGRFEGSRFLPYHTRNQINGGALDGKAPILGYAEDPVELFFMHIQGSGRLKTPSGKYIRIGYADKNEHPYVSIGKYMADKGYLKLGQTSMQGIKSYMRQNPQRLAEVLGQNPSYIFFRELTGSGNDGPVGALGTPLMGEYAGAVDRHYITLGAPLFVATAHPVTRKALNRLIMAQDTGSAIKGAVRVDYFWGYGDEAGELAGKQKTTGYVWQLLPNGMKPEYRP

SEQ ID NO: 4317 - protein, 441 aa, Neisseria; identical to SEQ ID NO: 4316

SEQ ID NO: 4318 - protein, 441 aa, Neisseria
MKKYLFRAALCGIAAAILAACQSKSIQTFPQPDTSVINGPDRPVGIPAPAGTTVGGGGAVYTVVPHLSLPHWAAQDFAKSLQSFRLGCANLKNRQGWQDVCAQAFQTPVHSVQAKQFFERYFTPWQVAGNGSLAGTVTGYYEPVLKGDDRRTAQARFPIYGIPDDFISVPLPAGLRSGKALVRIRQTGKNSGTIDNAGGTHTADLSRFPITARTTAIKGRFEGSRFLPYHTRNQINGGALDGKAPILGYAEDPVELFFMHIQGSGRLKTPSGKYIRIGYADKNEHPYVSIGKYMADKGYLKLGQTSMQGIKSYMRQNPQRLAEVLGQNPSYIFFRELTGSSNDGPVGALGTPLMGEYAGAVDRHYITLGAPLFVATAHPVTRKALNRLIMAQDTGSAIKGAVRVDYFWGYGDEAGELAGKQKTTGYVWQLLPNGMKPEYRP

SEQ ID NO: 4319 - protein, 441 aa, Neisseria; identical to SEQ ID NO: 634

SEQ ID NO: 4320 - protein, 441 aa, Neisseria
MKKYLFRAALYGIAAAILAACQSKSIQTFPQPDTSVINGPDRPVGIPDPAGTTVGGGGAVYTVVPHLSLPHWAEQDFAKSLQSFRLGCANLKNRQGWQDVCAQAFQTPVHSFQAKQFFERYFTPWQVAGNGSLAGTVTGYYEPVLKGDDRRTAQARFPIYGIPDDFISVPLPAGLRSGKALVRIRQTGKNSGTIDNTGGTHTADLSRFPITARTTAIKGRFEGSRFLPYHTRNQINGGALDGKAPILGYAEDPVELFFMHIQGSGRLKTPSGKYIRIGYADKNEHPYVSIGRYMADKGYLKLGQTSMQGIKAYMRQNPQRLAEVLGQNPSYIFFRELAGSSNDGPVGALGTPLMGEYAGAVDRHYITLGAPLFVATAHPVTRKALNRLIMAQDTGSAIKGAVRVDYFWGYGDEAGELAGKQKTTGYVWQLLPNGMKPEYRP

SEQ ID NO: 4321 - protein, 441 aa, Neisseria
MKKYLFRAALCGIAAAILAACQSKSIQTFPQPDTSVINGPDRPVGIPAPAGTTVAGGGAVYTVVPHLSLPHWAAQDFAKSLQSFRLGCANLKNRQGWQDVCAQAFQTPVHSFQAKQFFERYFTPWQVAGNGSLAGTVTGYYEPVLKGDDRRTAQARFPIYGIPDDFISVPLPAGLRSGKALVRIRQTGKNSGTIDNAGGTHTADLSRFPITARTTAIKGRFEGSRFLPYHTRNQINGGALDGKAPILGYAEDPVELFFMHIQGSGRLKTPSGKYIRIGYADKNEHPYVSIGKYMADKGYLKLGQTSMQGIKSYMRQNPQRLAEVLGQNPSYIFFRELTGSRNDGPVGALGTPLMGEYAGAVDRHYITLGAPLFVATAHPVTRKALNRLIMAQDTGSAIKGAVRVDYFWGYGDEAGELAGKQKTTGYVWQLLPNGMKPEYRP

SEQ ID NO: 4322 - protein, 441 aa, Neisseria
MKKYLFRAALYGIAAAILAACQSKSIQTFPQPDTSVINGPDRPVGIPDLAGTTVGGGGAVYTVVPHLSLPHWAAQDFAKSLQSFRLGCANLKNHQGWQDVCAQAFQTPVHSFQAKQFFERYFTPWQVAGNGSLAGTVTGYYEPVLKGDDRRTAQARFPIYGIPDDFISVPLPAGLRSGKALVRIRQTGKNSGTIDNTGGTHTADLSRFPITARTTAIKGRFEGSRFLPYHTRNQINGGALDGKAPILGYAEDPVELFFMHIQGSGRLKTPSGKYIRIGYADKNEHPYVSIGKYMADKGYLKLGQTSMQGIKSYMRQNPQRLAEVLGQNPSYIFFRELTGSGNDGPVGALGTPLMGEYAGAVDRHYITLGAPLFVATAHPVTRKALNRLIMAQDTGSAIKGAVRVDYFWGYGDEAGELAGKQKTTGYVWQLLPNGMKPEYRP

SEQ ID NO: 4323 - protein, 441 aa, Neisseria
MKKYLFRAALCGIAAAILAACQSKSIQTFPQPDTSVINGPGRPVGIPDPAGTTVGGGGAVYTVVPHLSLPHWAAQDFAKSLQSFRLGCANLKNRQGWQDVCAQAFQTPVHSFQAKQFFERYFTPWQVAGNGSLAGTVTGYYEPVLKGDDRRTAQARFPIYGIPDDFISVPLPAGLRSGKALVRIRQTGKNSGTIDNTGGTHTADLSQFPITARTTAIKGRFEGSRFLPYHTRNQINGGALDGKAPILGYAEDPVELFFMHIQGSGRLKTPSGKYIRIGYADKNEHPYVSIGKYMADKGYLKLGQTSMQGIKSYMRQNPQRLAEVLGQNPSYIFFRELTGSSNDGPVGALGTPLMGEYAGAVDRHYITLGAPLFVATAHPVTRKALNRLIMAQDTGSAIKGAVRVDYFWGYGDEAGELAGKQKTTGYVWQLLPNGMKPEYRP

SEQ ID NO: 4324 - protein, 441 aa, Neisseria
MKKYLFRAALYGIAAAILAACQSKSIQTFPQPDTSVINGPDRPVGIPDPAGTTVGGGGAVYTVVPHLSLPHWAAQDFAKSLQSFRLGCANLKNRQGWQDVCAQAFQTPVHSFQAKQFFERYFTPWQVAGNGSLAGTVTGYYEPVLKGDDRRTAQARFPIYGIPDDFISVPLPAGLRSGKALVRIRQTGKNSGTIDNTGGTHTADLSRFPITARTTAIKGRFEGSRFLPYHTRNQINGGALDGKAPILGYAEDPVELFFMHIQGSGRLKTPSGKYIRIGYADKNEHPYVSIGKYMADKGYLKLGQTSMQGIKSYMRQNPQRLAEVLGQNPSYIFFRELTGSSNDGPVGALGTPLMGEYAGAVDRHYITLGAPLFVATAHPVTRKALNRLIMAQDTGSAIKGAVRVDYFWGYGDEAGELAGKQKTTGYVWQLLPNGMKPEYRP

SEQ ID NO: 4325 - protein, 441 aa, Neisseria; identical to SEQ ID NO: 634

SEQ ID NO: 4326 - protein, 441 aa, Neisseria; identical to SEQ ID NO: 634

SEQ ID NO: 4327 - protein, 441 aa, Neisseria; identical to SEQ ID NO: 634

SEQ ID NO: 4328 - protein, 441 aa, Neisseria; identical to SEQ ID NO: 634

SEQ ID NO: 4329 - protein, 441 aa, Neisseria; identical to SEQ ID NO: 4064

SEQ ID NO: 4330 - protein, 441 aa, Neisseria
MKKYLFRAALYGIAAAILAACQSKSIQTFPQPDTSVINGPDRPVGIPDPAGTTVGGGGAVYTVVPHLSLPHWAAQDFAKSLQSFRLGCANLKNRQGWQDVCAQAFQTPVHSFQAKQFFERYFTPWQVAGNGSLAGTVTGYYEPVLKGDDRRTAQARFPIYGIPDDFISVPLPAGLRSGKALVRIRQTGKNSGTIDNAGGTHTADLSRFPITARTTAIKGRFEGSRFLPYHTRNQINGGALDGKAPILGYAEDPVELFFMHIQGSGRLKTPSGKYIRIGYADKNEHPYVSIGKYMADKGYLKLGQTSMQGIKSYMRQNPQRLAEVLGQNPSYIFFRELAGSSNDGPVGALGTPLMGEYAGAVDRHYITLGAPLFVATAHPVTSKALNRLIMAQDTGSAIKGAVRVDYFWGYGDEAGETAGKMKEPGYVWQLLPNGMKPEYRP

SEQ ID NO: 4331 - protein, 441 aa, Neisseria; identical to SEQ ID NO: 4316

SEQ ID NO: 4332 - protein, 441 aa, Neisseria; identical to SEQ ID NO: 4316

SEQ ID NO: 4333 - protein, 441 aa, Neisseria
MKKYLFRAALYGIAAAILAACQSKSIQTFPQPDTSVINGPDRPVGIPDPAGTTVGGGGAVYTVVPHLSLPHWAAQDFAKSLQSFRLGCANLKNRQGWQDVCAQAFQTPVHSVQAKQFFERYFTPWQVAGNGSLAGTVTGYYEPVLKGDDRRTAQARFPIYGIPDDFISVPLPAGLRSGKALVRIRQTGKNSGTIDNTGGTHTADLSQFPITARTTAIKGRFEGSRFLPYHTRNQINGGALDGKAPILGYAEDPVELFFMHIQGSGRLKTPSGKYIRIGYADKNEHPYVSIGRYMADKGYLKLGQTSMQGIKAYMQQNPQRLAEVLGQNPSYIFFRELTGSSNDGPVGALGTPLMGEYAGAVDRHYITLGAPLFVATAHPVTRKALNRLIMAQDTGSAIKGAVRVDYFWGYGDEAGELAGKQKTTGYVWQLLPNGMKPEYRP

SEQ ID NO: 4334 - protein, 441 aa, Neisseria
MKKYLFRAALYGISAAILAACQSKSIQTFPQPDTSVINGPDRPAGIPDPAGTTVAGGGAVYTVVPHLSLPHWAAQDFAKSLQSFRLGCANLKNRQGWQDVCAQAFQTPVHSFQAKQFFERYFTPWQVAGNGSLAGTVTGYYEPVLKGDDRRTAQARFPIYGIPDDFISVPLPAGLRSGKALVRIRQTGKNSGTIDNAGGTHTADLSRFPITARTTAIKGRFEGSRFLPYHTRNQINGGALDGKAPILGYAEDPVELFFMHIQGSGRLKTPSGKYIRIGYADKNEHPYVSIGRYMADKGYLKLGQTSMQGIKSYMRQNPQRLAEVLGQNPSYIFFRELTGSSNDGPVGALGTPLMGEYAGAVDRHYITLGAPLFVATAHPVTRKALNRLIMAQDTGSAIKGAVRVDYFWGYGDEAGETAGKMKEPGYVWQLLPNGMKPEYRP

SEQ ID NO: 4335 - protein, 441 aa, Neisseria
MKKYLFRAALCGIAAAILAACQSKSIQTFPQPDTSVINGPDRPVGIPDPAGTTVGGGGAVYTVVPHLSLPHWAAQDFAKSLQSFRLGCANLKNRQGWQDVCAQAFQTPVHSFQAKQFFERYFTPWQVAGNGSLAGTVTGYYEPVLKGDDRRTAQARFPIYGIPDDFISVPLPAGLRSGKALVRIRQTGKNSGTIDNTGGTHTADLSQFPITARTTAIKGRFEGSRFLPYHTRNQINGGALDGKAPILGYAEDPVELFFMHIQGSGRLKTPSGKYIRIGYADKNEHPYVSIGRYMADKGYLKLGQTSMQGIKAYMRQNPQRLAEVLGQNPSYIFFRELAGSSNDGPVGALGTPLMGEYAGAVDRHYITLGAPLFVATAHPVTRKALNRLIMAQDTGSAIKGAVRVDYFWGYGDEAGELAGKQKTTGYVWQLLPNGMKPEYRP

SEQ ID NO: 4336 - protein, 441 aa, Neisseria
MKKYLFRAALCGIAAAILAACQSKSIQTFPQPDTSVINGPDRPVGIPDPAGTTVGGGGAVYTVVPHLSLPHWAAQDFAKSLQSFRLGCANLKNRQGWQDVCAQAFQTPVHSFQAKQFFERYFTPWQVAGNGSLAGTVTGYYEPVLKGDDRRTAQARFPIYGIPDDFISVPLPAGLRSGKALVRIRQTGKNSGTIDNTGGTHTADLSQFPITARTTAIKGRFEGSRFLPYHTRNQINGGALDGKAPILGYAEDPVELFFMHIQGSGRLKTPSGKYIRIGYADKNEHPYVSIGRYMADKGYLKLGQTSMQGIKSYMRQNPQRLAEVLGQNPSYIFFRELTGSGNDGPVGALGTPLMGEYAGAVDRHYITLGAPLFVATTHPITRKALNRLIMAQDTGSAIKGAVRVDYFWGYGDEAGELAGKQKTTGYVWQLLPNGMKPEYRP

SEQ ID NO: 4337 - protein, 441 aa, Neisseria
MKKHLFRAALYGIAAAILAACQSKSIQTFPQPDTSIIKGPDRPAGIPDPAGTTVGGGGAVYTVVPHLSLPHWAAQDFAKSLQSFRLGCANLKNRQGWQDVCAQAFQTPVHSFQAKQFFERYFTPWQVAGNGSLAGTVTGYYEPVLKGDDRRTAQARFPIYGIPDDFISVPLPAGLRSGKALVRIRQTGKNSGTIDNAGGTHTADLSRFPITARTTAIKGRFEGSRFLPYHTRNQINGGALDGKAPILGYAEDPVELFFMHIQGSGRLKTPSGKYIRIGYADKNEHPYVSIGRYMADKGYLKLGQTSMQGIKAYMRQNPQRLAEVLGQNPSYVFFRELAGSGNDGPVGALGTPLMGEYAGAVDRHYITLGAPLFVATAHPVTRKALNRLIMAQDTGSAIKGAVRVDYFWGYGDEAGELAGKQKTTGYVWQLLPNGMKPEYRP

SEQ ID NO: 4338 - protein, 441 aa, Neisseria
MKKHLLRSALYGIAAAILAACQSRSIQTFPQPDTSVINGPDRPAGIPDPAGTTVAGGGAVYTVVPHLSMPHWAAQDFAKSLQSFRLGCANLKNRQGWQDVCAQAFQTPVHSFQAKRFFERYFTPWQVAGNGSLAGTVTGYYEPVLKGDGRRTERARFPIYGIPDDFISVPLPAGLRGGKALVRIRQTGKNSGTIDNAGGTHTADLSRFPITARTTAIKGRFEGSRFLPYHTRNQINGGALDGKAPILGYAEDPVELFFMHIQGSGRLKTPSGKYIRIGYADKNEHPYVSIGRYMADKGYLKLGQTSMQGIKAYMRQNPQRLAEVLGQNPSYIFFRELAGSGGDGPVGALGTPLMGGYAGAIDRHYITLGAPLFVATAHPVTRKALNRLIMAQDTGSAIKGAVRVDYFWGYGDEAGELAGKQKTTGYVWQLLPNGMKPEYRP

SEQ ID NO: 4339 - protein, 441 aa, Neisseria
MKKHLLRSALYGIAAAILAACQSRSIQTFPQPDTSVINGPDRPAGIPDPAGTTVAGGGAVYTVVPHLSMPHWAAQDFAKSLQSFRLGCANLKNRQGWQDVCAQAFQTPIHSFQAKRFFERYFTPWQVAGNGSLAGTVTGYYEPVLKGDGRRTERARFPIYGIPDDFISVPLPAGLRGGKNLVRIRQTGKNSGTIDNAGGTHTADLSRFPITARTTAIKGRFEGSRFLPYHTRNQINGGALDGKAPILGYAEDPVELFFMHIQGSGRLKTPSGKYIRIGYADKNEHPYVSIGRYMADKGYLKLGQTSMQGIKSYMRQNPHKLAEVLGQNPSYIFFRELAGSGNEGPVGALGTPLMGEYAGAIDRHYITLGAPLFVATAHPVTRKALNRLIMAQDTGSAIKGAVRVDYFWGYGDEAGELAGKQKTTGYVWQLLPNGMKPEYRP

SEQ ID NO: 4340 - protein, 441 aa, Neisseria; identical to SEQ ID NO: 524

SEQ ID NO: 4341 - protein, 215 aa, Neisseria; identical to SEQ ID NO: 1682

SEQ ID NO: 4342 - protein, 351 aa, Neisseria
VPPVQSAPVYTPPAYVPPSAPAVSGTYVPSYAPVDINAATHTIVRGDTVYNISKRYHISQDDFRAWNGMTDNTLSIGQIVKVKPAGYAAPKAAAVKSRPAVPAAAQPPVQSAPVDINAATHTIVRGDTVYNISKRYHISQDDFRAWNGMTDNMLSIGQIVKVKPAGYAAPKTAAVESRPAVPAAVQTPVKPAAQPPVQSAPQPAAPAAENKAVPAPAPQSPAASPSGTRSVGGIVWQRPTQGKVVADFGGNNKGVDIAGNAGQPVLAAADGKVVYAGSGLRGYGNLVIIQHNSSFLTAYGHNQKLLVGEGQQVKRGQQVALMGNTDASRTQLHFEVRQNGKPVNPNSYIAF

SEQ ID NO: 4343 - protein, 414 aa, Neisseria
  VARIANT (1)...(414): Xaa = Any Amino Acid
MLTPTTLVACTALAAQLGGCPTQHPSPVIAGNSGMQTVPSAPVYNPYGATPYNAAPAANDAPYVPPVQSAPVYXPPAYVPPSAPAVSGTYVPSYAXVDINAATHTIVRGDTVYKISKCYHISQDDFRAWNGMTDNTLSIGQIVKVKPAGYAAPKAAAVKSRPAVPAAAQPLVQSAPVDINAATHTIVRGDTVYNISKRYHISQDDFRAWNGMTDNTLSIGQIVKVKPAGYAAPKAAAVKSRPAVPAAVQTPVKPAAQPPVQSAPQPAAPAAENKAVPAPAPQSPAASPSGTRSVGGIVWQRPTQGKVVADFGGNNKGVDIAGNAGQPVLAAADGKVVYAGSGLRGYGNLVIIQHNSSFLTAYGHNQKLLVGEGQQVKRGQQVALMGNTEASRTQLHFEVRQNGKPVNPNSYIAF

SEQ ID NO: 4344 - protein, 282 aa, Neisseria
  VARIANT (1)...(282): Xaa = Any Amino Acid
MVSLRFRFGNHFKRRHSDNFLFRQPNIMRIFRFGLVGHGNLQQPRHHRNRRSLNQQRQHHHGKRHIKQQVRIGNAHHQRHHRQRNRYGSSQAQPTDIRLFTQAVIEFPQTAEHCQRTRDQHQERRNRQGFRRPVQHAGGRNQQTEHDEQSCLRQPSQTVHHTQNVFRRTVALVTDNDAGKVNRQKAAAAYGIGKRKHKQPARHNHQRVQTFRTHLQFPINVIAVSRVKMFFTSESPPSSQPETFMCXTLGCPNGFSNLPMTLLVAPFARFLLPGKLVVPVLH

SEQ ID NO: 4345 - protein, 84 aa, Neisseria
RLKHGVGLHFYSAIRLFTQAVIEFPQTAEHCRRTRDQHQERRNRQGFRRPVQHVGRRNQQQRHSQTCGQSGRNHAQKQQCATRQ

SEQ ID NO: 4346 - protein, 71 aa, Neisseria
IRLFTQAVIEFPQTAEHCRRTRDQHQERRNRQGFRRPVQHVGRRNQQQRHSQTCGQSGRNHAQKQQCATRQ

SEQ ID NO: 4347 - protein, 256 aa, Neisseria
MRRNVPAVAVLRRPRFEAFLDLALAQARAVPAGKQGFAVRCRLTQRQIVFQGFHAFAGQRNLTLLAPFAGNVYPRFVQIYIICIQAVYLAHAQTAAVHQLEQRVVAHRQRVAAVHGQIQHPVQPFLRQGFGYALGLLRRFDVGGRVGAHQPAFDQPGAILPPRRQLARQRPTVQTALRQPPQRRRKIAPRQVLRHAACIFRRHLCQQCKQFFQIAPVCRNRVLRLALAHDVFQISVKIRRKPVQNHNRPTQISKNQ

SEQ ID NO: 4348 - protein, 176 aa, Neisseria
  VARIANT (1)...(176): Xaa = Any Amino Acid
MRRNVXAVAVXRRPLRQTFLDLALAQARAVPAGKQGFAVRCRLTQRQIVFQGFHAFADQRHLPLXAPFADNVYPRXVQIDIICIQAVYLAHAQTAAVHQFEQGVVAHRQRVAAVHGQIQHPVQPFLRQGFGYALGLLRRFDVGGRVGVHQAALYQPNAILPPRRKLASQRPFPQTA

SEQ ID NO: 4349 - protein, 256 aa, Neisseria
MRRNVPAVAVLRRPLRQTFLDLALAQARAVPAGKQGFAVRCRLTQRQIVFQGFHAFAGQRNLPLLASFAGNVYPRLVQIYIICIQAVYLAHAQTAAVHQFEQRVIAHRQRVAAVHGQIQHPVQPFLRQGFGYALGLLRRFDVGGRVGMQQTAFDQPGAILPPRRQLARQRPRIQTALRQPPQRRRKIALRQALRHAACIFRRHLCQQRKQFFQIAPVCRHRVLRLALAHDVFQISVKMRRKPVQNHNRPTQISKKQ

SEQ ID NO: 4350 - protein, 509 aa, Neisseria
MAAADKLLGGDRRSVAIIGDGAMTAGQAFEALNCAGDMDVDLLVVLNDNEMSISPNVGALPKYLASNVVRDMHGLLSTVKAQTGKVLDKIPGAMEFAQKVEHKIKTLAEEAEHAKQSLSLFENFGFRYTGPVDGHNVENLVDVLKDLRSRKGPQLLHVITKKGNGYKLAENDPVKYHAVANLPKEGGAQMPSEKEPKPAAKPTYTQVFGKWLCDRAAADSRLVAITPAMREGSGLVEFEQRFPDRYFDVGIAEQHAVTFAGGLACEGMKPVVAIYSTFLQRAYDQLVHDIALQNLPVLFAVDRAGIVGADGPTHAGLYDLSFLRCVPNMIVAAPSDENECRLLLSTCYQADAPAAVRYPRGTGTGAPVSDGMETVEIGKGIIRREGEKTAFIAFGSMVATALAVAEKLNATVADMRFVKPIDEELIVRLARSHDRIVTLEENAEQGGAGGAVLEVLAKHGICKPVLLLGVADTVTEHGDPKKLLDDLGLSAEAVERRVREWLPDRDAAN

SEQ ID NO: 4351 - protein, 509 aa, Neisseria
  VARIANT (1)...(509): Xaa = Any Amino Acid
MAAADKLLGSDRRSVAIIGDGAMTAGQAFEALNCAXDMDVDLLVVLNDNEMSISPNVGALPKYLASNVVRDMHGLLSTVKAQTGKVLDKIPGAMEFAQKVEHKIKTLAEEAEHAKQSLSLFENFGFRYTGPVDGHNVENLVDVLKDLRSRKGPQLLHVITKKGNGYKLAENDPVKYHAVANLPKESAAQMPSEKEPKPAAKPTYTQVFGKWLCDRAAADSRLVAITPAMREGSGLVEFEQRFPDRYFDVGIAEQHAVTFAGGLACEGMKPVVAIYSTFLQRAYDQLVHDIALQNLPVLFAVDRAGIVGADGPTHAGLYDLSFLRCVPNMIVAAPSDENECRLLLSTCYQADAPAAVRYPRGTGTGAPVSDGMETVEIGKGIIRREGEKTAFIAFGSMVAPALAVAEKLNATVADMRFVKPIDEELIVRLARSHDRIVTLEENAEQGGAGGAVLEVLAKHGICKPVLLLGVADTVTGHGDPKKLLDDLGLSAEAVERRVRAWLSDRDAAN

SEQ ID NO: 4352 - protein, 193 aa, Neisseria
MKHTVSASVILLLTACAQLPQNNENLWQPSEHTRSFTAEGRLAVKAEGKGSYANFDWTYQPPVETININTPLGSTLGQLCQDRDGALAVDGKGNVYQAESAEELSRQLVGFKLPIQYLHIWADGRPVAGAPYRILPDGILEQYGWTVGRTADSGGQVRTLQLNNGNLNIRLVFTEIGMPSETETQEQCAARIQ

SEQ ID NO: 4353 - protein, 1457 aa, Neisseria; identical to SEQ ID NO: 325

SEQ ID NO: 4354 - protein, 338 aa, Neisseria; identical to SEQ ID NO: 342

SEQ ID NO: 4355 - protein, 287 aa, Neisseria; identical to SEQ ID NO: 109

SEQ ID NO: 4356 - protein, 591 aa, Neisseria; identical to SEQ ID NO: 448

SEQ ID NO: 4357 - protein, 313 aa, Neisseria; identical to SEQ ID NO: 157

SEQ ID NO: 4358 - protein, 145 aa, Neisseria; identical to SEQ ID NO: 596

SEQ ID NO: 4359 - protein, 152 aa, Neisseria; identical to SEQ ID NO: 3097

SEQ ID NO: 4360 - protein, 260 aa, Neisseria; identical to SEQ ID NO: 1128

SEQ ID NO: 4361 - protein, 232 aa, Neisseria; identical to SEQ ID NO: 867

SEQ ID NO: 4362 - protein, 274 aa, Neisseria; identical to SEQ ID NO: 506

SEQ ID NO: 4363 - protein, 187 aa, Neisseria; identical to SEQ ID NO: 1596

SEQ ID NO: 4364 - protein, 1082 aa, Neisseria; identical to SEQ ID NO: 500

SEQ ID NO: 4365 - protein, 386 aa, Neisseria; identical to SEQ ID NO: 3082

SEQ ID NO: 4366 - protein, 158 aa, Neisseria; identical to SEQ ID NO: 3598

SEQ ID NO: 4367 - protein, 258 aa, Neisseria; identical to SEQ ID NO: 2483

SEQ ID NO: 4368 - protein, 207 aa, Neisseria; identical to SEQ ID NO: 4033
  VARIANT (1)...(207): Xaa = Any Amino Acid

SEQ ID NO: 4369 - protein, 202 aa, Neisseria; identical to SEQ ID NO: 2603

SEQ ID NO: 4370 - protein, 273 aa, Neisseria; identical to SEQ ID NO: 3137

SEQ ID NO: 4371 - protein, 584 aa, Neisseria; identical to SEQ ID NO: 534

SEQ ID NO: 4372 - protein, 441 aa, Neisseria; identical to SEQ ID NO: 4064

SEQ ID NO: 4373 - protein, 497 aa, Neisseria; identical to SEQ ID NO: 3269

SEQ ID NO: 4374 - protein, 47 aa, Neisseria
LLFLTFPFGSQVKGLFNQQFGGRGIGRFTEPRRSRRAAPSREGKLKE

SEQ ID NO: 4375 - protein, 45 aa, Neisseria
MNKTWKRQVFRHTALYTAILMFSHTGGGGGRRKRKRKRKRINTLL

SEQ ID NO: 4376 - protein, 7 aa, Neisseria
TRKICPR

SEQ ID NO: 4377 - protein, 8 aa, Neisseria
SGGINISH

SEQ ID NO: 4378 - protein, 61 aa, Neisseria
RTKAMNAKLSIRVVLVWQKRALVSHSIIPMKLLLKKKILSFSARRPTCRPTERFPVLIPLS

SEQ ID NO: 4379 - protein, 17 aa, Neisseria
PSAKMPLIRLVRPKRGW

SEQ ID NO: 4380 - protein, 54 aa, Neisseria
ATATKVAHAPAEVVLQLPIEPNLPSAIPVWQKRQTAAGWIYTKTKAATIRPFTN

SEQ ID NO: 4381 - protein, 33 aa, Neisseria
RIILGWACLSIWAERAPSNQRDKVLWYLLLART

SEQ ID NO: 4382 - protein, 40 aa, Neisseria
RSKMVRAANTKTKTSFIRQTITRVRIIKTIRTNTTPSPFI

SEQ ID NO: 4383 - protein, 25 aa, Neisseria
TPSCTCWIKNTLKISCKVKQLIWVS

SEQ ID NO: 4384 - protein, 60 aa, Neisseria
KHASSRRKHGKDGIVTFLTVVGRMKRKEQSASNSNCRKSKQAAASTQITPIRVPKPLPPH

SEQ ID NO: 4385 - protein, 37 aa, Neisseria
LPPRCGSDLCKMVRCRCIPLRFPPTPIVRAAASSFKI

SEQ ID NO: 4386 - protein, 168 aa, Neisseria
KEKPTPTNPAAIPSQTWLSRILKIDSRISQGGKPSSDWMAAYSRSNWVETMMRSPILMEMTAKTTLSALLVKGASCLMPASGKKYCCLGRFVLPMMTVNLTHSTKKKKTASQNTAKNTAAATTASTSAIWATSSTAPSWRSASIWLLPPTTGWCISSNKAAGTSAATI

SEQ ID NO: 4387 - protein, 74 aa, Neisseria
SSVISRVRCRARIFKTPNPPLPKSCAPLPKKAMWATATAWTAALSCAKSNGTGKTMCLCSARWALAAEARMPWI

SEQ ID NO: 4388 - protein, 27 aa, Neisseria
AKSTAATATWQTFPCLMSNMTRMAITA

SEQ ID NO: 4389 - protein, 49 aa, Neisseria
ATPSARRKSAKPTTANTPLSSPPVMRLKTLPAATIKPRCMCMIWKAAAR

SEQ ID NO: 4390 - protein, 43 aa, Neisseria
LKKSKYPVARAGFRPPRWWIKIWTARSISPMPAIAAAVCTALI

SEQ ID NO: 4391 - protein, 28 aa, Neisseria
AIKILINGLYAPFLKAQNRLLPRPLFPN

SEQ ID NO: 4392 - protein, 13 aa, Neisseria
KTNAWLSSARAVI

SEQ ID NO: 4393 - protein, 25 aa, Neisseria
VRMMYSVRANNIFTVSSTTIRWRIT

SEQ ID NO: 4394 - protein, 22 aa, Neisseria
NSAVWEAGCSSKSLSRRIKPYS

SEQ ID NO: 4395 - protein, 14 aa, Neisseria
PITSDPTDRAAKGG

SEQ ID NO: 4396 - protein, 18 aa, Neisseria
RADSALPSNRPWYCVPPL

SEQ ID NO: 4397 - protein, 27 aa, Neisseria
PSINIRVRTNAARKPPFWVSIPPTAAS

SEQ ID NO: 4398 - protein, 32 aa, Neisseria
PRKARARLCRPRIRLSRNIPAIRKASTANPSL

SEQ ID NO: 4399 - protein, 46 aa, Neisseria
VVCKKAMKSSARTDMFTTNRLMCVIWMKRKQTDFQQRQTAMRAAAV

SEQ ID NO: 4400 - protein, 22 aa, Neisseria
TPPASVPAKTTAASPKKGCAPC

SEQ ID NO: 4401 - protein, 14 aa, Neisseria
TIWTAWTLPARRAV

SEQ ID NO: 4402 - protein, 11 aa, Neisseria
  VARIANT (1)...(11): Xaa = Any Amino Acid
NESAGVKSSTX

SEQ ID NO: 4403 - protein, 190 aa, Neisseria
MKDKKMNIIDTAIPDVKLLEPQVFGDARGFFMETFRDEWFKTQVCERTFVQENHSKSGKGVLRGLHYQTENTQGKLVRVVVGEVFDVAVDMRKDSPTFGKWVGEILSAENKRQLWVPEGFAHGFYVLSDEAEFVYKCTDYYKPEAEQVLIWNDPTVGIGWPLQTAPLLSPKDLAGKTWAQAEKLRLPLYR

SEQ ID NO: 4404 - protein, 30 aa, Neisseria
KMPSERFRRHFFRQPTCPPSVRAVQRKTSR

SEQ ID NO: 4405 - protein, 33 aa, Neisseria
RRTPNPAKKRRHPSFADSTRAAHPSRRWSRRRQ

SEQ ID NO: 4406 - protein, 35 aa, Neisseria
SHRSGFHRQSGRRRTRFRCARRFSDGLRGFPLFYR

SEQ ID NO: 4407 - protein, 16 aa, Neisseria
CVSTPPPTPRLPRWAY

SEQ ID NO: 4408 - protein, 22 aa, Neisseria
  VARIANT (1)...(22): Xaa = Any Amino Acid
RTAADKYPYRPQGRAGQVCRLX

SEQ ID NO: 4409 - protein, 276 aa, Neisseria
MHTPLTYIDLFSGAGGLSLGFEQAGFQQLLSVEMESDYCQTYRTNFPHHQLLQKDLTTLTEQDLINCLNGQAVDLIIGGPPCQGFSMAGKIGRTFTDDPRNHLFKEFVRIVKIVQPYFFVMENVARLYTHNSGKTRIEIIQAFQNIGYSVECKILSAADFGVPQIRSRVIFIGRRDKGKISFPEPLQISHQTVGSAIGHFPKLAAGESNPHVANHEAMNHSAQMLEKMAFVKNGGNRNDIPEPLRPKTGDIRKYIRYNSNKTSRLYYRRYAQSFSL

SEQ ID NO: 4410 - protein, 8 aa, Neisseria
TESGVNRS

SEQ ID NO: 4411 - protein, 8 aa, Neisseria
ISCLTIFP

SEQ ID NO: 4412 - protein, 15 aa, Neisseria
FYFLRQQNCPAAAGW

SEQ ID NO: 4413 - protein, 11 aa, Neisseria
RRTAFIGKSYC

SEQ ID NO: 4414 - protein, 6 aa, Neisseria
KYFKNE

SEQ ID NO: 4415 - protein, 376 aa, Neisseria
MTAAPDILYRQAAALLEQSNTAQALPLLQQAAEQGYAEAAFVLGNHLLQNGQPEQALSWLEAAAAQRHPKALFSLLQQREHNGTPTGQLLNDYAWLGEQGHSEAQLILMRYHAQRNDPQSLYWAELAAARYAAPAYYHLARHHQRQGDVETAIEQYEKAAALGVTAACWQLGQIYFYGTGVSPNHAQAEHYLEPAAQAGHIAAQTLLADLLAAQRKPEALEWYRRAADKEQAEAQSKLAQYALTGELSERDPFQAARYAKAAAEKNHPEALKIMGDLYRYGLGIKADNHIAQDYYHRAAALGSAAAAQKLISDAALYHPQQYEQIKTAACNNNKPKPSTVWRKHKPAPSAVPPTTMPREKITWKLPGSTIKTQRQP

SEQ ID NO: 4416 - protein, 70 aa, Neisseria
AASTITASVRRKILGRLHTGTPLLPNKTTLPPNTTSPVFTITGKVSAVMFRPPATGCRPPSATATLRPNH

SEQ ID NO: 4417 - protein, 17 aa, Neisseria
  VARIANT (1)...(17): Xaa = Any Amino Acid
NNGDAKHTMPSDKRPSX

SEQ ID NO: 4418 - protein, 46 aa, Neisseria
MRKSRLSRYKQNKLIELFVAGVTARTAAELVGVNKNTAAYYFHRLR

SEQ ID NO: 4419 - protein, 12 aa, Neisseria
LNLSKQPTFRNV

SEQ ID NO: 4420 - protein, 6 aa, Neisseria
WRSRSR

SEQ ID NO: 4421 - protein, 17 aa, Neisseria
KLFWRTTQRQTRSRCCR

SEQ ID NO: 4422 - protein, 11 aa, Neisseria
SRRIRSFEAKW

SEQ ID NO: 4423 - protein, 19 aa, Neisseria
GLYGYSTEYSNRYFISYYP

SEQ ID NO: 4424 - protein, 4 aa, Neisseria
TSET

SEQ ID NO: 4425 - protein, 9 aa, Neisseria
QHFLYGLLS

SEQ ID NO: 4426 - protein, 7 aa, Neisseria
CIRCARI

SEQ ID NO: 4427 - protein, 47 aa, Neisseria
NFVFVSITAHILPNDKTILMELRTFGTRQNVIYASLTAFPKRILSCI

SEQ ID NO: 4428 - protein, 11 aa, Neisseria
RSANDVLTTVR

SEQ ID NO: 4429 - protein, 7 aa, Neisseria
  VARIANT (1)...(7): Xaa = Any Amino Acid
KFLFHFX

SEQ ID NO: 4430 - protein, 269 aa, Neisseria
MSHLFRKEVFVAQQNKWTGQVILTRPFSFLFLTFCAFLIALCIIIFLIFGSYTNKTTVEGQLLPTMGVVRVYSSDIGTITHKFVEDGNFVKAGEPLFKLSTSRFGEKGNVQAKLAAEANLKKTLALQELERLKRIHQNEQKNVHNNIHRLNNQLENIKQQITGQNRQIRLAEKTLNKNKFLASQGAVSQQDKMTAESHLLEQRSRLESLKREQNNAIRELDEQKITLSSLPERHKTELSQLNRAITEMNQEILDFDLKSEQTIRASKSG

SEQ ID NO: 4431 - protein, 13 aa, Neisseria
DLCKNNLLTKFDA

SEQ ID NO: 4432 - protein, 9 aa, Neisseria
KCAKKFSIA

SEQ ID NO: 4433 - protein, 201 aa, Neisseria
NLPNIEQKVGKIRKVLHFENEIEHKILVTYVIAKVSGYISTINVDIGQQVEPSKLLLSIVPEQTELVANLYIPSKAVGFIKPKDKVVLRYQAYPYQKFGHATGEIISVARTALGKQKLSGLGIIFTNPTLLNEPAYLVKVKLEKQTIKAYGENKPLQIGMILEADILHERKNCTNGYLTHFTAFQEKSIKNGLFIKTVLWI

SEQ ID NO: 4434 - protein, 165 aa, Neisseria
MDYLSRLSFGFNKKLPVILQTEVAECGLACLTSILSYYGFHTDLRTLRQKYTLSLKGANLADIMRFGNEMNLTPRALRLELDELSNLQLPCILHWNLNHFVVLCSISKDSIVIMDPAVGMRKIKMDEVSQKFTGIALELFPNTHFEEKKETKKIKILSLLRGGQA

SEQ ID NO: 4435 - protein, 5 aa, Neisseria
FKCLY

SEQ ID NO: 4436 - protein, 17 aa, Neisseria
LFLWKSLHWLVHSLCNG

SEQ ID NO: 4437 - protein, 4 aa, Neisseria
TMSL

SEQ ID NO: 4438 - protein, 7 aa, Neisseria
LLIKIYY

SEQ ID NO: 4439 - protein, 8 aa, Neisseria
PLLWDLVY

SEQ ID NO: 4440 - protein, 5 aa, Neisseria
LSCNS

SEQ ID NO: 4441 - protein, 7 aa, Neisseria
LACYKHG

SEQ ID NO: 4442 - protein, 32 aa, Neisseria
VCTYLQLLIYNGKPIYLKGYLTYLMTISVNDI

SEQ ID NO: 4443 - protein, 6 aa, Neisseria
FQDLVQ

SEQ ID NO: 4444 - protein, 6 aa, Neisseria
IISKKH

SEQ ID NO: 4445 - protein, 6 aa, Neisseria
LLLFLF

SEQ ID NO: 4446 - protein, 7 aa, Neisseria
WLFLLSC

SEQ ID NO: 4447 - protein, 8 aa, Neisseria
QFTALNYR

SEQ ID NO: 4448 - protein, 6 aa, Neisseria
HLFCTY

SEQ ID NO: 4449 - protein, 8 aa, Neisseria
FVGLHITH

SEQ ID NO: 4450 - protein, 41 aa, Neisseria
EMQQKKILFMKPNKTHISWKPFVVSNQLNYLINIIKDMALG

SEQ ID NO: 4451 - protein, 6 aa, Neisseria
IQSIPS

SEQ ID NO: 4452 - protein, 23 aa, Neisseria
QQINSLLYLNFQINCCLAWKMLS

SEQ ID NO: 4453 - protein, 8 aa, Neisseria
FILVQAQF

SEQ ID NO: 4454 - protein, 8 aa, Neisseria
MVHLQSVF

SEQ ID NO: 4455 - protein, 26 aa, Neisseria
WLFWLIKGNLKAEQLLSLTNTSKSKC

SEQ ID NO: 4456 - protein, 11 aa, Neisseria
GFMLNVWLTLL

SEQ ID NO: 4457 - protein, 15 aa, Neisseria
MKQKLKLLSIIIYLN

SEQ ID NO: 4458 - protein, 38 aa, Neisseria
IMNNWFLKLKTSHSDMLIMSHIFLKTLIWNLKIMKQLF

SEQ ID NO: 4459 - protein, 11 aa, Neisseria
QDNLVGGSPLC

SEQ ID NO: 4460 - protein, 24 aa, Neisseria
NLKLVQLVLMGMIYIKFLHPLLGD

SEQ ID NO: 4461 - protein, 53 aa, Neisseria
AGLFAKMMSFLQVLLGKIFHFLMKAQIWSSLNNVQKWHKYMTIYLKCQWAMRP

SEQ ID NO: 4462 - protein, 30 aa, Neisseria
LAIWEISYQVDKSRELSWLVHCINDPKFYF

SEQ ID NO: 4463 - protein, 6 aa, Neisseria
TKQVAI

SEQ ID NO: 4464 - protein, 9 aa, Neisseria
KMNKKLTIT

SEQ ID NO: 4465 - protein, 5 aa, Neisseria
KVLVL

SEQ ID NO: 4466 - protein, 15 aa, Neisseria
WLHTAKKQFNRQIKF

SEQ ID NO: 4467 - protein, 166 aa, Neisseria
MRKSRLSQYKQNKLIELFVTGVTARTAAELVGVNKNTAAYYFHRLRLLIYQNSPHLEMFDGEVEADESYFGGQRKGKRGRGAAGKVAVFGLLKRNGKVYTVTVPNTQTATLFPIIREQVKPDSIFYTDCYRSYDVLDVREFSHFSFAETSFSYQSQHTFCRTTKPY

SEQ ID NO: 4468 - protein, 13 aa, Neisseria
ELLESGKTSFTQV

SEQ ID NO: 4469 - protein, 7 aa, Neisseria
RHSQSAF

SEQ ID NO: 4470 - protein, 10 aa, Neisseria
AVFKGVRMAF

SEQ ID NO: 4471 - protein, 9 aa, Neisseria
  VARIANT (1)...(9): Xaa = Any Amino Acid
DKSSCSILX

SEQ ID NO: 4472 - protein, 33 aa, Neisseria
ARTCSKSHVIPVFEALIRDADFQYIFSATTTKA

SEQ ID NO: 4473 - protein, 5 aa, Neisseria
CLSGR

SEQ ID NO: 4474 - protein, 41 aa, Neisseria
GRFLSVSANIIWFKRNTGVLRQIRQKTVIIRQIRYSNFCIF

SEQ ID NO: 4475 - protein, 7 aa, Neisseria
KRPFIVD

SEQ ID NO: 4476 - protein, 18 aa, Neisseria
  VARIANT (1)...(18): Xaa = Any Amino Acid
QKPVQRCLALAQRERFSX

SEQ ID NO: 4477 - protein, 297 aa, Neisseria
MIHVSAVQAPAHIQDTGRYGHRRYGIGHAGAMDTVALAAGNILLGNDEGTAAIEIALGGIMLVFERDTPFCLTGAVYQAELDGEPVYSYWRYTARKGQTLKLVRAVQGMYGYVCVAGGFDVPEVMGSRSTDLKAGFGGHQGRMLQKGDYLPIGKGAQELSKVGIAPIPFTDTVHLVPSSEYAAFSEKGRLNLERETWTLQSDSNRMGYRFDGQPLTLSQPLEMLSHAVQAGTVQVPPGGKPIILLADAQTTGGYPKIATVAAADLGRLAQVRFGSKVKFKIIGLKEATALRRKNKPI

SEQ ID NO: 4478 - protein, 12 aa, Neisseria
  VARIANT (1)...(12): Xaa = Any Amino Acid
TKYGESPMKQVX

SEQ ID NO: 4479 - protein, 47 aa, Neisseria
MRKSRLSRYKQNKLIELFVAGVTARTATEPDSIVYTDCYRSYSFTQV

SEQ ID NO: 4480 - protein, 7 aa, Neisseria
RHSQSAF

SEQ ID NO: 4481 - protein, 10 aa, Neisseria
AVFKGVRMAF

SEQ ID NO: 4482 - protein, 19 aa, Neisseria
  VARIANT (1)...(19): Xaa = Any Amino Acid
DKSSNFHFKTISKIEFILX

SEQ ID NO: 4483 - protein, 445 aa, Neisseria
MQAVRYRPEIDGLRAVAVLSVMIFHLNNRWLPGGFLGVDIFFVISGFLITGIILSEIQNGSFSFRDFYTRRIKRIYPAFIAAVSLASVIASQIFLYEDFNQMRKTVELSAVFLSNIYLGFQQGYFDLSADENPVLHIWSLAVEEQYYLLYPLLLIFCCKKTKSLRVLRNISIILFLILTASSFLPSGFYTDILNQPNTYYLSTLRFPELLAGSLLAVYGQTQNGRRQTANGKRQLLSSLCFGALLACLFVIDKHNPFIPGMTLLLPCLLTALLIRSMQYGTLPTRILSASPIVFVGKISYSLYLYHWIFIAFAHYITGDKQLGLPAVSAVAALTAGFSLLSYYLIEQPLRKRKMTFKKAFFCLYLAPSLILVGYNLYARGDIETGTPPPVARRAPCCGKSFSGNRPDPRRLARRTPEGVSGLCRQPGRVESQNPVPRFGVFGLGR

SEQ ID NO: 4484 - protein, 13 aa, Neisseria
EAGRQPVMSKIPG

SEQ ID NO: 4485 - protein, 11 aa, Neisseria
KSRSRFHCPIL

SEQ ID NO: 4486 - protein, 11 aa, Neisseria
FEDGRPACAEI

SEQ ID NO: 4487 - protein, 71 aa, Neisseria
SAILPNTRVPSPIQGNRQKDSRRQTRLCFCKQHINQPFAPEGGKIEKICRKPISPPHSGYGRHRQEQSGGL

SEQ ID NO: 4488 - protein, 52 aa, Neisseria
RYSQCALGGRTKIPAQKHGRNIRPLSLRRPRPPDLFRFLLYGAGIPQTRTPA

SEQ ID NO: 4489 - protein, 10 aa, Neisseria
  VARIANT (1)...(10): Xaa = Any Amino Acid
IFPRRRIAVX

SEQ ID NO: 4490 - protein, 129 aa, Neisseria
MPSETARPLYADTCAAHTLVWFRQNLRIRDNAALCAAVAEVCPLSAFGLTMPKQTTLAAPRSTANPPPNSPKGLQGAASRSTRRHLLPSSSGSPSASISAPSSPTNPILLPTNSPTTPFGTNWTNTASR

SEQ ID NO: 4491 - protein, 13 aa, Neisseria
PSSTTAPFSAKPT

SEQ ID NO: 4492 - protein, 83 aa, Neisseria
YPTAARHMPISTATAKYGSTAFPSSPPPVRTYSRHTANPSPKTFPPRSLPRFQTASSCRKTAAKRRLGGSGGGFSNRRIPTPF

SEQ ID NO: 4493 - protein, 10 aa, Neisseria
RISPRANTLR

SEQ ID NO: 4494 - protein, 4 aa, Neisseria
WARI

SEQ ID NO: 4495 - protein, 18 aa, Neisseria
VPAASRRACSRGKASNAV

SEQ ID NO: 4496 - protein, 35 aa, Neisseria
TRGRTTSSAAIFSFNLPCSTRMTTLQTAILNTPCA

SEQ ID NO: 4497 - protein, 29 aa, Neisseria
RFGSRAGPAFRLSMPRCAVCTKPAASTPP

SEQ ID NO: 4498 - protein, 8 aa, Neisseria
ARIFSATF

SEQ ID NO: 4499 - protein, 14 aa, Neisseria
TSPAAKARYGLPDS

SEQ ID NO: 4500 - protein, 78 aa, Neisseria
  VARIANT (1)...(78): Xaa = Any Amino Acid
PISMQQSTKATGGLPPHGTPAPTLPPPHTKPTPTAPLSDGTFPSLPTCPPTPSTRLGGLPVRSIPTAIPPILSPVFPX

SEQ ID NO: 4501 - protein, 18 aa, Neisseria
MTLKASKQASKQASKRSG

SEQ ID NO: 4502 - protein, 29 aa, Neisseria
SINIICFIAVLHAICLRFGCVRSRQRSRD

SEQ ID NO: 4503 - protein, 24 aa, Neisseria
KQIYFRSGGRQKFPRLARPVQHIF

SEQ ID NO: 4504 - protein, 41 aa, Neisseria
LLRYVQSSAWFKYSFYQNRRRCRFFIFRQAETRHFPLFFQR

SEQ ID NO: 4505 - protein, 10 aa, Neisseria
NRSKFIRIWV

SEQ ID NO: 4506 - protein, 6 aa, Neisseria
RNQYPR

SEQ ID NO: 4507 - protein, 6 aa, Neisseria
RHPRRR

SEQ ID NO: 4508 - protein, 14 aa, Neisseria
YARCQKIYYREVWG

SEQ ID NO: 4509 - protein, 5 aa, Neisseria
FKAGG

SEQ ID NO: 4510 - protein, 17 aa, Neisseria
KSITGFIQNKTGSLGRK

SEQ ID NO: 4511 - protein, 11 aa, Neisseria
GGVYSTVWNKI

SEQ ID NO: 4512 - protein, 10 aa, Neisseria
YAQTDDARFN

SEQ ID NO: 4513 - protein, 10 aa, Neisseria
IGRRFRTHSS

SEQ ID NO: 4514 - protein, 4 aa, Neisseria
YITD

SEQ ID NO: 4515 - protein, 6 aa, Neisseria
SQQHLQ

SEQ ID NO: 4516 - protein, 44 aa, Neisseria
KITRQNRKQIPRRRTGVGTDQDDAERFPLGTAPPFRHPYAGNFR

SEQ ID NO: 4517 - protein, 9 aa, Neisseria
CPHPPEHER

SEQ ID NO: 4518 - protein, 5 aa, Neisseria
KTDRP

SEQ ID NO: 4519 - protein, 24 aa, Neisseria
GLCGRRGFPVRLRRAGVGRTRPDL

SEQ ID NO: 4520 - protein, 39 aa, Neisseria
RQSQRTIRRGFGTPAGKSENARRAQTDCGKNGGFRFVCV

SEQ ID NO: 4521 - protein, 105 aa, Neisseria
TKLPAGTVRIIAQAMRRRILLGRAAFGYPRGGSGFICPTGLCGKYFVWAACRRQGRRRVCRRSVPSKIVAALHRRPVASKYTGRRGCGRVAQRRANRRRGVCTAK

SEQ ID NO: 4522 - protein, 28 aa, Neisseria
RQPTGNRRDGRQGRPARISQRQRRCGRQ

SEQ ID NO: 4523 - protein, 17 aa, Neisseria
FVWLWRGCLCCVASVAR

SEQ ID NO: 4524 - protein, 20 aa, Neisseria
TNGCVFGRLVAIPTFQTPHQ

SEQ ID NO: 4525 - protein, 32 aa, Neisseria
KPCGTLQNQRLDGFCRRRLQRACGGRHCRKRQ

SEQ ID NO: 4526 - protein, 51 aa, Neisseria
CAVLPTTAGAVYLLGRKRRLYRQRGDGGRTARQRSVAKPRRHSGKNPFCFA

SEQ ID NO: 4527 - protein, 10 aa, Neisseria
RCQSSAFCRF

SEQ ID NO: 4528 - protein, 31 aa, Neisseria
CFAQVKIFRRGNGRRKTDAGRQDGTRRAVRY

SEQ ID NO: 4529 - protein, 33 aa, Neisseria
  VARIANT (1)...(33): Xaa = Any Amino Acid
SRLERPYVRTHRIWQKDGRRQRSRIVAQMAVLX

SEQ ID NO: 4530 - protein, 150 aa, Neisseria
  VARIANT (1)...(150): Xaa = Any Amino Acid
MNFSFVPLFLVTLILLGVVSNNNSITISATILLLMQQTALIQFVPLVEKHGLNLGIILLTIGVLSPLVSGKAQVPPVAEFLNFKMISAVFIGIFVAWLAGRGVPYDGTAACFNYRAVNRDGYRGGIYGRYPCRAADCGRHLVFCRRKGLX

SEQ ID NO: 4531 - protein, 145 aa, Neisseria
MKQSARIKNMNQTLKNTLGICALLAFCFGAAIASGYHLEYEYGYRYSAVGALASVVFLLLLARGFPRVSSVVLLIYVGTTALYLPVGWLYGAPSYQIVGSILESNPAEAREFVGNLPGSLYFVQALFFIFGLTVWKYCVSGGGIC

SEQ ID NO: 4532 - protein, 4 aa, Neisseria
RKKL

SEQ ID NO: 4533 - protein, 21 aa, Neisseria
TPQQNMADYIIDFDFVLRGDG

SEQ ID NO: 4534 - protein, 4 aa, Neisseria
NRQR

SEQ ID NO: 4535 - protein, 5 aa, Neisseria
RFART

SEQ ID NO: 4536 - protein, 47 aa, Neisseria
CRPVVEYFRPVLRFGFRAGTICRQARPHFGSSKKSVNMAYPSCCAQV

SEQ ID NO: 4537 - protein, 7 aa, Neisseria
KLCCGYR

SEQ ID NO: 4538 - protein, 54 aa, Neisseria
ERAFGLYECLRFPIARYAFFESDQRAVDKRLPIDRPRDESFAAADFGAAGRTEQ

SEQ ID NO: 4539 - protein, 16 aa, Neisseria
HRQLGEAGGFSDGVAV

SEQ ID NO: 4540 - protein, 27 aa, Neisseria
SRNVGAFCQRNFHLCPTQRLSVVYPKG

SEQ ID NO: 4541 - protein, 40 aa, Neisseria
LWQKRGVERPPFVAGVQTGFDRKCRHEASADCDAPDGFAQ

SEQ ID NO: 4542 - protein, 6 aa, Neisseria
FLHTFG

SEQ ID NO: 4543 - protein, 9 aa, Neisseria
GCAAVSVSN

SEQ ID NO: 4544 - protein, 13 aa, Neisseria
KNILLCFHHRANR

SEQ ID NO: 4545 - protein, 6 aa, Neisseria
IFRRYS

SEQ ID NO: 4546 - protein, 17 aa, Neisseria
RKLVFGLLFRPRFDACR

SEQ ID NO: 4547 - protein, 21 aa, Neisseria
RRRANVDTWCVEASKLRRAAG

SEQ ID NO: 4548 - protein, 4 aa, Neisseria
NFVR

SEQ ID NO: 4549 - protein, 6 aa, Neisseria
HAARND

SEQ ID NO: 4550 - protein, 6 aa, Neisseria
SEAQRV

SEQ ID NO: 4551 - protein, 18 aa, Neisseria
FFTRIRQLDGYRNRRVAR

SEQ ID NO: 4552 - protein, 13 aa, Neisseria
FLGECSRCAGRRQ

SEQ ID NO: 4553 - protein, 22 aa, Neisseria
PCLYRRTARRPRAVVCGKRQID

SEQ ID NO: 4554 - protein, 45 aa, Neisseria
MNPAPKKPSLLFSSLLFSSLLFSSLPQRRRQVKTAAAARIMCRRI

SEQ ID NO: 4555 - protein, 22 aa, Neisseria
LMPPNALPTIIRKQPVQTTQAR

SEQ ID NO: 4556 - protein, 26 aa, Neisseria
AIISETSVRIPSTPGCRSAMISAAGE

SEQ ID NO: 4557 - protein, 23 aa, Neisseria
RQIMPVTENGKKVILLLKKLLKR

SEQ ID NO: 4558 - protein, 112 aa, Neisseria
TTTTKKPKQNIRETAASTPFLLSACPPFTISNSTINSNPISARASPTDTLNIKFIRWKQKPRLLPLNQRTALHREALLYKLIPANLPITKATASAAWVLVSSPVSVSTSRPS

SEQ ID NO: 4559 - protein, 33 aa, Neisseria
  VARIANT (1)...(33): Xaa = Any Amino Acid
PWTPDTVTTTGDAWKTPASKPTKSHWACATASX

SEQ ID NO: 4560 - protein, 58 aa, Neisseria
MEDKQGMTKAVAGVMTDALADGRKPTTASNLPPLSNRGGQKPKRQAGFRKSSNVTKRT

SEQ ID NO: 4561 - protein, 7 aa, Neisseria
RTVKETC

SEQ ID NO: 4562 - protein, 33 aa, Neisseria
AFLFGAVYQIRLSLIKLAFHFMKKPFSINTAFV

SEQ ID NO: 4563 - protein, 40 aa, Neisseria
VFWKTKILFAPRPCSPKKFSVSVSTKNPKVRAVVSMSAVG

SEQ ID NO: 4564 - protein, 23 aa, Neisseria
WVRKTPYTVASILAANKIPFFSN

SEQ ID NO: 4565 - protein, 19 aa, Neisseria
PAPVAASQKKAGNHDFSHS

SEQ ID NO: 4566 - protein, 59 aa, Neisseria
LMQSAQKSHALTSQKTFSTANTARTKPVKTEIKVCLPVITSNQKANVWGQIGKKTMKPK

SEQ ID NO: 4567 - protein, 93 aa, Neisseria
PKARPMVSAPVNRPNMSASMKKASSWAIKQAHGRDLKLNSKQKTSLSLSKFCRIRANISAAHIRFANDSPKRQRAYTRLRKIRSFQPTATLNG

SEQ ID NO: 4568 - protein, 10 aa, Neisseria
KNSSDVRQTV

SEQ ID NO: 4569 - protein, 14 aa, Neisseria
NSFFPNWTKPNCLN

SEQ ID NO: 4570 - protein, 21 aa, Neisseria
LSRVITSCPSLWLPKPTTAPF

SEQ ID NO: 4571 - protein, 60 aa, Neisseria
  VARIANT (1)...(60): Xaa = Any Amino Acid
KLKPFMNSPHSNRTKTLTICTNITRILKNSLNSKNTSTMKKAITTSFTTNSQDYRFHGLX

SEQ ID NO: 4572 - protein, 58 aa, Neisseria
MIHEEISAMPMGYETLIGDMGSALSGGQKQRIVLARALILRTENPIFRCSDQPFGYCQ

SEQ ID NO: 4573 - protein, 28 aa, Neisseria
KSSQCKLEWLVYHKNYGGTQKGNGGISR

SEQ ID NO: 4574 - protein, 7 aa, Neisseria
  VARIANT (1)...(7): Xaa = Any Amino Acid
ENVFRIX

SEQ ID NO: 4575 - protein, 406 aa, Neisseria; identical to SEQ ID NO: 311

SEQ ID NO: 4576 - protein, 149 aa, Neisseria
LLIHYIDIAKRNFVIAVSSLSKTKTETNNPKGIAHTIEYLKKHKVALVVTESTGGLEIPAAKAIRRAGIAVIIANPRQTHQFAQSQPLTKTDAKDAKMLAFFAQMMTQKEGSQTMPYHPPTEVEEVLEALVNRRNQLVDMRTAEKNRLH

SEQ ID NO: 4577 - protein, 168 aa, Neisseria
VHETQVGSVKQLIAHFDRLIDELDKQIDDHTHTHFDGKAQVAEQIKGIGSITTATLMAMLPELGRLSHKRIASLAGIAPHPRESEETKFKSRCFGGRSAVRKALYMATVAATRFEPLIRDFYQRLLSKGKPYKVAVTACMRKLLTISNARMRDYFAENDTAENGIRTA

SEQ ID NO: 4578 - protein, 151 aa, Neisseria
MDLSIVVPIYNVESYLEACLSSIESILSNENVELILVNDGSKDGSEDICYKYIDKISNSKQQTTNNKQQTTNNKQQTTNNKQQTTNNKQQTTNNKQQTTNNKQQTTNNKQQTTNNKQQTTNNKQQTTNNKQQTTNNKQQTPDTKYQIYISG

SEQ ID NO: 4579 - protein, 22 aa, Neisseria
PRVVGGEKYRNKKFKRKIYSLY

SEQ ID NO: 4580 - protein, 8 aa, Neisseria
LSDFAGFS

SEQ ID NO: 4581 - protein, 10 aa, Neisseria
YAGCGVFKCG

SEQ ID NO: 4582 - protein, 12 aa, Neisseria
GKCFIFWRRLSA

SEQ ID NO: 4583 - protein, 17 aa, Neisseria
KNTQSIQSRSFERIMPI

SEQ ID NO: 4584 - protein, 8 aa, Neisseria
KISGFGVE

SEQ ID NO: 4585 - protein, 8 aa, Neisseria
DYKKRIDY

SEQ ID NO: 4586 - protein, 5 aa, Neisseria
RKTVF

SEQ ID NO: 4587 - protein, 5 aa, Neisseria
KGNLF

SEQ ID NO: 4588 - protein, 9 aa, Neisseria
RYRMVNEVI

SEQ ID NO: 4589 - protein, 47 aa, Neisseria
CGNNFFLFGRLLLLLSAGKKRFYYGNCFGKKYKVIIIYFGEKCGNGI

SEQ ID NO: 4590 - protein, 23 aa, Neisseria
GYIELSLFFSFLRISRFAFYNDE

SEQ ID NO: 4591 - protein, 4 aa, Neisseria
KYRV

SEQ ID NO: 4592 - protein, 16 aa, Neisseria
YKKKGVSFKVYAVKVQ

SEQ ID NO: 4593 - protein, 27 aa, Neisseria
  VARIANT (1)...(27): Xaa = Any Amino Acid
ADIPDNHITRGRYYRQDFKSNQGEYLX

SEQ ID NO: 4594 - protein, 57 aa, Neisseria
MRFSRFELRGRLKTEKLFQTTFLLTSCHSNRTKAAYLHIHIGNTGEIFCKFYEYFTC

SEQ ID NO: 4595 - protein, 17 aa, Neisseria
SEHWLNKHYVKIESGWY

SEQ ID NO: 4596 - protein, 13 aa, Neisseria
IVVFQLWIAIYNN

SEQ ID NO: 4597 - protein, 14 aa, Neisseria
  VARIANT (1)...(14): Xaa = Any Amino Acid
SLYLCNTVCSLEIX

SEQ ID NO: 4598 - protein, 343 aa, Neisseria
MPDFQRITIENIEYFIVDSIQNLRAEDSFIHRNNKLSVFGGNGEARKYVGSYIDDSGRKLSTFFEYENWGITETKNGRRVEYPFIQKNCFFYKKNLQRYLVDAKVEYHKQEQKYHHDISRFYDDYVLSINNLPTENIFFSIHDVSDHLENSKGYRRGYIRSEDDIWSIWRKIVLPKISYLSILKLLPVKDIEDSEPLFYFRIFLDYQFRSIVHPQLLSREKLEIPASEFNQFVEQEIIKQKSRKGQQKYRKDVINHMSQCPFTLITDEILLRASHIKPYMVCITEKNEKEALDYLNGLALTPTYDWLFDQGYITFLDDGRLICGTRLSRYTWEKLNINPNAKN

SEQ ID NO: 4599 - protein, 25 aa, Neisseria
DENISRRKRKIFGISSQICVSGQYR

SEQ ID NO: 4600 - protein, 4 aa, Neisseria
  VARIANT (1)...(4): Xaa = Any Amino Acid
FLVX

SEQ ID NO: 4601 - protein, 162 aa, Neisseria
MDMQNKAKKLIEMIQTAPVEWKPLGEVAKVLRGKRLTKKELIEGGKYPVFHGGLIPLGWFDQFNRRANQTMIINTGSIGEVIWSGVDFWSSDGTFVIQTPNYLDDKFIFYFLKTREGYIKSQKRVGGVPTIDRLVVENISIPIPPLETQQKIVKILDKFTEL

SEQ ID NO: 4602 - protein, 36 aa, Neisseria
ATLEATLEAELTLRKRQYRYYRDFLLDFNNQIGGDS

SEQ ID NO: 4603 - protein, 15 aa, Neisseria
RPSERCGLEDVGGGI

SEQ ID NO: 4604 - protein, 13 aa, Neisseria
YFCWRRRTKRRFL

SEQ ID NO: 4605 - protein, 12 aa, Neisseria
SGNGRILYPHFI

SEQ ID NO: 4606 - protein, 4 aa, Neisseria
WYRK

SEQ ID NO: 4607 - protein, 6 aa, Neisseria
GTIWLD

SEQ ID NO: 4608 - protein, 4 aa, Neisseria
NQST

SEQ ID NO: 4609 - protein, 5 aa, Neisseria
LNYIS

SEQ ID NO: 4610 - protein, 6 aa, Neisseria
RNYRLG

SEQ ID NO: 4611 - protein, 15 aa, Neisseria
TFFPNSTPVSVNTKN

SEQ ID NO: 4612 - protein, 13 aa, Neisseria
IKPKICLLLYEKY

SEQ ID NO: 4613 - protein, 72 aa, Neisseria
  VARIANT (1)...(72): Xaa = Any Amino Acid
KRYSTANETNDKRYFNPHPSTPRTGKNRRHPRQIRHPDPLHQRGPTVRNCPAPETIRILPRAVVELPKGCLX

SEQ ID NO: 4614 - protein, 150 aa, Neisseria
MAKIITPLSANQVKNAKPRDKLYKLSDGAGWLCGSTRRAGGVGSCRLCRMEGSRQFRWGGILIFRWPMRGNGGRRCAENGRTGKMSSIRRCGRILLLRRWRVIGLCVGRRGGLKSMPDRLCGILSGGFFRLSAILIFVKSGRRMWSAVCV

SEQ ID NO: 4615 - protein, 16 aa, Neisseria
WRRAVSLIRCAKRKTV

SEQ ID NO: 4616 - protein, 11 aa, Neisseria
RWCLRLRSVRE

SEQ ID NO: 4617 - protein, 24 aa, Neisseria
WKSTLSRKSVRVCLNGRKRGIWQR

SEQ ID NO: 4618 - protein, 7 aa, Neisseria
VRLNCRA

SEQ ID NO: 4619 - protein, 21 aa, Neisseria
LIFWSSAMNLRFMRAGCVSIL

SEQ ID NO: 4620 - protein, 9 aa, Neisseria
RGFVSIGCC

SEQ ID NO: 4621 - protein, 7 aa, Neisseria
RGFRRRR

SEQ ID NO: 4622 - protein, 41 aa, Neisseria
WSGRSWTGRFGVSPPNGKRSGGGMMCRCRGRCSGCWIRRGR

SEQ ID NO: 4623 - protein, 8 aa, Neisseria
TGGLCLKV

SEQ ID NO: 4624 - protein, 38 aa, Neisseria
IFKGISIRKVRAWRCSGRGWIRRRTVCARLRVLICARF

SEQ ID NO: 4625 - protein, 11 aa, Neisseria
  VARIANT (1)...(11): Xaa = Any Amino Acid
RWIVLCGNANX

SEQ ID NO: 4626 - protein, 55 aa, Neisseria
MNPAPKKPSLLFSSLLFSSLLFSSLLFSSLLFSSLPQRRRQVKTAAAARIMCRRI

SEQ ID NO: 4627 - protein, 22 aa, Neisseria
LMPPNALPTIIRKQPVQTTQAR

SEQ ID NO: 4628 - protein, 26 aa, Neisseria
AIISETSVRIPSTPGCRSAMISAAGE

SEQ ID NO: 4629 - protein, 23 aa, Neisseria
RQIMPVTENGKKVILLLKKLLKR

SEQ ID NO: 4630 - protein, 112 aa, Neisseria
TTTTKKPKQNIRETAASTPLLLSAYPPFTISNSTINSNPISARASPTDTLNIKFIRWKPKPRLLPLNQRKALHREVLLYKLIPANLPITKATASAAWVLVSSPVSVSTSRPS

SEQ ID NO: 4631 - protein, 33 aa, Neisseria
  VARIANT (1)...(33): Xaa = Any Amino Acid
PWTPDTVTTTGDAWKTPDSKPTKSHWACATASX

SEQ ID NO: 4632 - protein, 58 aa, Neisseria; identical to SEQ ID NO: 4560

SEQ ID NO: 4633 - protein, 7 aa, Neisseria
RTVKETC

SEQ ID NO: 4634 - protein, 33 aa, Neisseria; identical to SEQ ID NO: 4562

SEQ ID NO: 4635 - protein, 40 aa, Neisseria; identical to SEQ ID NO: 4563

SEQ ID NO: 4636 - protein, 23 aa, Neisseria
WVRKTPYTVASILAANKIPFFSN

SEQ ID NO: 4637 - protein, 19 aa, Neisseria
PAPVAASQKKAGNHDFSHS

SEQ ID NO: 4638 - protein, 59 aa, Neisseria; identical to SEQ ID NO: 4566

SEQ ID NO: 4639 - protein, 93 aa, Neisseria; identical to SEQ ID NO: 4567

SEQ ID NO: 4640 - protein, 10 aa, Neisseria
KNSSDVRQTV

SEQ ID NO: 4641 - protein, 14 aa, Neisseria
NSFFPNWTKPNCLN

SEQ ID NO: 4642 - protein, 21 aa, Neisseria
LSRVITSCPSLWLPKPTTAPF

SEQ ID NO: 4643 - protein, 86 aa, Neisseria
KLKPFMNSPHSNRTKTLTICTNITRILKNSLNSKNTSTMKKAITTSFTTNSQDYRFHGLKVSARKTFNHTRKPKNEHPTSRPHRRR

SEQ ID NO: 4644 - protein, 69 aa, Neisseria
LLIHYIDIAKRNFVIAVSSLSKTKTETNNPKGIAHTIEYLKKHKVALVVTESTGGLEIPAAKAIRRAGP

SEQ ID NO: 4645 - protein, 16 aa, Neisseria
LSPTRVRRISLPNRSR

SEQ ID NO: 4646 - protein, 16 aa, Neisseria
PKPTPKMPKCPPSSHR

SEQ ID NO: 4647 - protein, 56 aa, Neisseria
RHRKKIRKPCPTTRPPKWKKCWKPWLTAATNWWICGLPRKTVCIRFMKRKSKASNN

SEQ ID NO: 4648 - protein, 6 aa, Neisseria
LPILTG

SEQ ID NO: 4649 - protein, 31 aa, Neisseria
LTNWTNKSTTTPTRILTAKPKWQSKSKASVR

SEQ ID NO: 4650 - protein, 4 aa, Neisseria
RRLR

SEQ ID NO: 4651 - protein, 14 aa, Neisseria
WRCCPNWGGCRTNG

SEQ ID NO: 4652 - protein, 69 aa, Neisseria
SALPHTRGRAGKPNSKAAALAEGLRCVRHCIWLPWQRHVLNRLFGISTNACRPRVSRIRLPLRHVCANC

SEQ ID NO: 4653 - protein, 22 aa, Neisseria
  VARIANT (1)...(22): Xaa = Any Amino Acid
RYRMPGCVIILPKTIPPKTVSX

SEQ ID NO: 4654 - protein, 90 aa, Neisseria
MIAKHIDRFPLLKLDQVIDWQPIEQYLNRQKTRYLRDHRGRPACPLLSMFKAVLLGQWHSLSDPELEHSLITRIDFNLFCRFDELSSIVD

SEQ ID NO: 4655 - protein, 52 aa, Neisseria
QKPVRRCLALPYYLYCLRLRRFVLIFVNPLYFMPLPQLAGARRHPVRIAQTD

SEQ ID NO: 4656 - protein, 18 aa, Neisseria
LPTDRKRFKNRESIRRRR

SEQ ID NO: 4657 - protein, 17 aa, Neisseria
RHHYSDRRQQTAPGHRS

SEQ ID NO: 4658 - protein, 12 aa, Neisseria
RRRTNQQPNHTE

SEQ ID NO: 4659 - protein, 40 aa, Neisseria
GQRCPLDQEKRPLQTRLQTTYPYRCGRLYRETAHHPRQCP

SEQ ID NO: 4660 - protein, 23 aa, Neisseria
VQTPVAVVGRSAQRYDRLCRQRL

SEQ ID NO: 4661 - protein, 45 aa, Neisseria
QCGKPATSERTSAAGRHYAQSLPQPSADGNANQTQPVFVEDPLCG

SEQ ID NO: 4662 - protein, 8 aa, Neisseria
TKLRYAAP

SEQ ID NO: 4663 - protein, 26 aa, Neisseria
  VARIANT (1)...(26): Xaa = Any Amino Acid
IPLRSGSLFRTDLRPLPPKRQPGCLX

SEQ ID NO: 4664 - protein, 183 aa, Neisseria
LNCCWRLSFYYQLAVQSAEDKYADLKRHIHDIYRRHKGRYGYRRIAAAIRHAGTPVNHKKVSRLMAKTGLKAVIRRRKYRSFKGEVGKIAPNILRRCFHAEKPNEKWVTDVTEFNVGGEKIYLSPIMDLFNGEIVSYRIQIRPTFDLAGEILKGAPEKPGSSEKPILHSDQGWQYQMFFIKSS

SEQ ID NO: 4665 - protein, 27 aa, Neisseria
KATVWFRVCPARETAWTMRQWKVSSER

SEQ ID NO: 4666 - protein, 33 aa, Neisseria
NRNVSIRANMIPLPNRKRHCTNISVTTTTIESS

SEQ ID NO: 4667 - protein, 9 aa, Neisseria
ALFSTELSP

SEQ ID NO: 4668 - protein, 4 aa, Neisseria
  VARIANT (1)...(4): Xaa = Any Amino Acid
KPLX

SEQ ID NO: 4669 - protein, 32 aa, Neisseria
MKGTPQFPQCGFSARAVEVLTQLADPLLLLIS

SEQ ID NO: 4670 - protein, 26 aa, Neisseria
KTQKFAVLYHSSPVGQPFHSFGLMVS

SEQ ID NO: 4671 - protein, 15 aa, Neisseria
SVVVILSYKCTNQVS

SEQ ID NO: 4672 - protein, 12 aa, Neisseria
  VARIANT (1)...(12): Xaa = Any Amino Acid
NHSLKSIAQRSX

SEQ ID NO: 4673 - protein, 52 aa, Neisseria
MDTFLDRLKFLWPHGAKPSDIYNKIEMSASGFNRVWKEGAIPTADYLVKIQL

SEQ ID NO: 4674 - protein, 14 aa, Neisseria
FKLAADRKRLAVSR

SEQ ID NO: 4675 - protein, 12 aa, Neisseria
SQAGKRRSILCK

SEQ ID NO: 4676 - protein, 49 aa, Neisseria
WNHRHYGQSCRPVRVCIRAALQRSRSSRVWRTSLRRRTFILLGFPEILD

SEQ ID NO: 4677 - protein, 15 aa, Neisseria
QLCDQTAGKTVCNYR

SEQ ID NO: 4678 - protein, 10 aa, Neisseria
RRFNGGRAQS

SEQ ID NO: 4679 - protein, 10 aa, Neisseria
GFHSHQPRRN

SEQ ID NO: 4680 - protein, 9 aa, Neisseria
RPICLAYRQ

SEQ ID NO: 4681 - protein, 17 aa, Neisseria
PLCQTCATYTGQTACNV

SEQ ID NO: 4682 - protein, 7 aa, Neisseria
KSTLRTV

SEQ ID NO: 4683 - protein, 16 aa, Neisseria
NRFEQCPRRHRHHRPC

SEQ ID NO: 4684 - protein, 6 aa, Neisseria
MVWPEY

SEQ ID NO: 4685 - protein, 7 aa, Neisseria
MKKSKKA

SEQ ID NO: 4686 - protein, 18 aa, Neisseria
LIGIVLTLWLVLKRQAGL

SEQ ID NO: 4687 - protein, 8 aa, Neisseria
ERYLSRLI

SEQ ID NO: 4688 - protein, 4 aa, Neisseria
HQIH

SEQ ID NO: 4689 - protein, 4 aa, Neisseria
MLLI

SEQ ID NO: 4690 - protein, 34 aa, Neisseria
KAKESLQQRLEYPQKKSGHLVLRNETISQPSQDL

SEQ ID NO: 4691 - protein, 55 aa, Neisseria
MIDVKIDNIFVVLNQIERLGNGIENRYLLMRRLSETMHTAVKLNFRYAGRPKWLG

SEQ ID NO: 4692 - protein, 13 aa, Neisseria
NTATASRFRIRVV

SEQ ID NO: 4693 - protein, 44 aa, Neisseria
KTVFPHCQTTIQPLSVRISSMPPSTTSAVWRGATAKFGFRNGNF

SEQ ID NO: 4694 - protein, 7 aa, Neisseria
RTTTNRL

SEQ ID NO: 4695 - protein, 10 aa, Neisseria
WTMCRIIFRV

SEQ ID NO: 4696 - protein, 147 aa, Neisseria
VFETPTFEQIRERILRDTKSLWPDADISPDSDHYVHASRLASCAEGQYAHQSWIVRQIFPDTADREYLERHASMRGLSRRNPTTASGTLTVSGIAQSMLSDDLQVRIGQRFYRTTARAVIGSGGTAEIPAIADEPGAAANVATARRN

SEQ ID NO: 4697 - protein, 51 aa, Neisseria
WPPPPVWPPNAALPYKAAPTEKAMPHCWRVCWKSSADRPQAATVTTIKTGR

SEQ ID NO: 4698 - protein, 4 aa, Neisseria
VLTA

SEQ ID NO: 4699 - protein, 43 aa, Neisseria
PAHMFIRCAAAWVRWILPLPPPTVCRRKKLCAAYRLISTRCAR

SEQ ID NO: 4700 - protein, 11 aa, Neisseria
RQKMRWYSSQP

SEQ ID NO: 4701 - protein, 26 aa, Neisseria
RRCLLPCKSSSTVSTWTRPSAAYGRP

SEQ ID NO: 4702 - protein, 6 aa, Neisseria
KNISTP

SEQ ID NO: 4703 - protein, 5 aa, Neisseria
SPATA

SEQ ID NO: 4704 - protein, 14 aa, Neisseria
LCRKSRLLSAMWMV

SEQ ID NO: 4705 - protein, 4 aa, Neisseria
STAV

SEQ ID NO: 4706 - protein, 24 aa, Neisseria
LRRRPTVPPIRLTASSGLKRARLM

SEQ ID NO: 4707 - protein, 6 aa, Neisseria
  VARIANT (1)...(6): Xaa = Any Amino Acid
RRCRHX

SEQ ID NO: 4708 - protein, 69 aa, Neisseria
MNYFGMVEFLRLMAMVRPPFVFFSGTRSELPAYLDLVAELRLTGWERFAGSQTLTVSSTSTAIQATTTT

SEQ ID NO: 4709 - protein, 5 aa, Neisseria
  VARIANT (1)...(5): Xaa = Any Amino Acid
FISSX

SEQ ID NO: 4710 - protein, 81 aa, Neisseria
MQKWQTELYSTPLWLCLTPKSAVKVLLLITAMITLVLTEMRLNVLSTFMSKGLYDSMQDLKCFGILDVCCNERGRGADTGV

SEQ ID NO: 4711 - protein, 13 aa, Neisseria
QRRQRLPRSRLGD

SEQ ID NO: 4712 - protein, 113 aa, Neisseria
MVGAAQRSADSTLACRQKLLPPANAPPRAGQHRPAYPTGRAGIYRFDHRICARHGQFGRYFSGICRCFAGLGWHPDRVRLRHSARHRLVCLYICDFGDLYRHVDRQPFDSLQL

SEQ ID NO: 4713 - protein, 36 aa, Neisseria
KRKTQRRLPLFPHPRARPRRKRGVLQRRKTRTRPAF

SEQ ID NO: 4714 - protein, 19 aa, Neisseria
SHYPQPLAYCATKRLPERL

SEQ ID NO: 4715 - protein, 80 aa, Neisseria
YVHQRHQALPHYFASAAPVCRTNQNRRHPADRPSLRATAKRAFFLPDVLQQIHRLPRPIGASVRLFAEYRRTTQRAATRD

SEQ ID NO: 4716 - protein, 10 aa, Neisseria
RSFRRHCTGM

SEQ ID NO: 4717 - protein, 19 aa, Neisseria
  VARIANT (1)...(19): Xaa = Any Amino Acid
GGGSFCTNWRQLLHRRSVX

SEQ ID NO: 4718 - protein, 28 aa, Neisseria
MAIKKKSALCITLGGLRRVARRYGCEPL

SEQ ID NO: 4719 - protein, 9 aa, Neisseria
RTMCLRYCF

SEQ ID NO: 4720 - protein, 12 aa, Neisseria
NMFLISISTAAA

SEQ ID NO: 4721 - protein, 24 aa, Neisseria
LSCTPVRLLTTSSNSKTPPTSATA

SEQ ID NO: 4722 - protein, 12 aa, Neisseria
IRLSPKLPKPTT

SEQ ID NO: 4723 - protein, 17 aa, Neisseria
STLPTSTTKTNWVKVRR

SEQ ID NO: 4724 - protein, 22 aa, Neisseria
AGLSAFLKSSTFLPTKPKTTIC

SEQ ID NO: 4725 - protein, 6 aa, Neisseria
VMPTNT

SEQ ID NO: 4726 - protein, 41 aa, Neisseria
CAILRPSQANPKGSFTRLPKSPALWRRLSESAQIAVQHQRL

SEQ ID NO: 4727 - protein, 61 aa, Neisseria
PDLRLGFAVAQSRRPSRQPNQPLRSGKRCGNRVPCPYEYDFAQQRNRRNQHREHLVRFVFP

SEQ ID NO: 4728 - protein, 4 aa, Neisseria
KRRA

SEQ ID NO: 4729 - protein, 29 aa, Neisseria
DLRFCRCQSALSRPKKTAITPFCCICSKA

SEQ ID NO: 4730 - protein, 82 aa, Neisseria
NQAAKVRLFFRTVCCFAAMPKRVFARNCLTLTLLKALSGCLPTCFTARAFLPASSSSTKNTPKPPNLPKREQTKLSAAAACL

SEQ ID NO: 4731 - protein, 48 aa, Neisseria
LTHRAASLKTATKTVCVSKTFTKSSTLSQTSLQPYGAFKRNRSTRLQP

SEQ ID NO: 4732 - protein, 40 aa, Neisseria
SASLYRQRRSRRPAKSRRLSIFMAAYLRTIWTHWKPIGKF

SEQ ID NO: 4733 - protein, 28 aa, Neisseria
KTSCLPNTMATLPLYNGIDCKSFPLSTA

SEQ ID NO: 4734 - protein, 12 aa, Neisseria
NPAGLVWNLGLI

SEQ ID NO: 4735 - protein, 8 aa, Neisseria
YSPKFNPL

SEQ ID NO: 4736 - protein, 62 aa, Neisseria
NRKQPNQSPYIGAPRLRRLQSRTPSKVCRVAHSKRPCRHPTGQAYPEMERKPAGRVQTRQPD

SEQ ID NO: 4737 - protein, 31 aa, Neisseria
RIRFLPNPDGLLGGNPARRCLSHRPRWLEGG

SEQ ID NO: 4738 - protein, 10 aa, Neisseria
KPGRNHQRKR

SEQ ID NO: 4739 - protein, 8 aa, Neisseria
SREPDRRL

SEQ ID NO: 4740 - protein, 202 aa, Neisseria
GNRNRQKRQSQNQAHQQKIPQRSHRPRAGCPPLLFRRHRQAGRKTKRAGTPKPRIGKPHRRTRRRRGCAERRIGCKRQTFRQTSENRIGRKRHRRRRTGCFTNHPNTDDAGKSRERRSQNPNRSPEPCRIQTIWPTFRSRNQAACRSRQMACRFTKPNRKSLGKQYSAAYQPLEHAGRPLPQPDGRACPRSGKVAKQSQCPP

SEQ ID NO: 4741 - protein, 8 aa, Neisseria
  VARIANT (1)...(8): Xaa = Any Amino Acid
KYGFWRLX

SEQ ID NO: 4742 - protein, 30 aa, Neisseria
MKTFALILAGGQASRMGGEDKGLALLGVRH

SEQ ID NO: 4743 - protein, 99 aa, Neisseria
TMSSTGSGRRSAISPSAPTGIWKNMLEEVRIFFPMRGSGSISARFRHCVPQPTICSWRLLTGFWLCRAICRICRTIWWRGLKPCRNAHRCAMRIMWKRR

SEQ ID NO: 4744 - protein, 24 aa, Neisseria
RCTTTLCISARRFCKARFPICFRV

SEQ ID NO: 4745 - protein, 22 aa, Neisseria
EAGCSSKGRGRSDSSLTGILPT

SEQ ID NO: 4746 - protein, 10 aa, Neisseria
  VARIANT (1)...(10): Xaa = Any Amino Acid
TRKSICRRDX

SEQ ID NO: 4747 - protein, 32 aa, Neisseria
MIFSIIVPIYNVENTSAAAWIPCLPKILPIMK

SEQ ID NO: 4748 - protein, 24 aa, Neisseria
FWSMTVRRTAAGRFATNMQANIRI

SEQ ID NO: 4749 - protein, 23 aa, Neisseria
FIKKTAGCRMPATPVSGRQKAIT

SEQ ID NO: 4750 - protein, 252 aa, Neisseria
SFWTATIIGPIPTVQKTRGGILFDLQQLADKKVDLILHPSSFNYRDIPKGADFSDNDFVRHFETLVEGRYYIANAWTKIVRREIIIKNNLFFPKGYIHEDFPYSLQLARFIKTFAFYDNPFYQYRVLGGSISHNIKYKNFSDVLTHLDWGVDFLVENKNSPIYGGLQKFVFDNIGYLRSILVRLYFSKNIILIYRKYFSFKEKCRKIFGAKAIRPVFIGKTAFIIGLPILRLLVPPMLYPAIKAVYQKFFSE

SEQ ID NO: 4751 - protein, 33 aa, Neisseria
MLPTQPNPTQPNPTQPNPTQPNPTQPNPTQALI

SEQ ID NO: 4752 - protein, 62 aa, Neisseria
ATQPGRTLRQSTLQTALPPTLPNSNSSKNCFPPVLTQTEISLSTDYKPKSRRRPTSDANFTK

SEQ ID NO: 4753 - protein, 18 aa, Neisseria
TGWANHMLACFATCRPKP

SEQ ID NO: 4754 - protein, 18 aa, Neisseria
VKTRRTTPSPKMQAAKTC

SEQ ID NO: 4755 - protein, 5 aa, Neisseria
FVATI

SEQ ID NO: 4756 - protein, 7 aa, Neisseria
KTPTQTA

SEQ ID NO: 4757 - protein, 29 aa, Neisseria
FTSTRPKTPDQTALSIRTTANSHPLNLPA

SEQ ID NO: 4758 - protein, 11 aa, Neisseria
PILMKTKPRGF

SEQ ID NO: 4759 - protein, 27 aa, Neisseria
ISPTKAQTRTAHGSPLCIRACMSPANC

SEQ ID NO: 4760 - protein, 4 aa, Neisseria
RTTV

SEQ ID NO: 4761 - protein, 12 aa, Neisseria
FLSRLTITKRRS

SEQ ID NO: 4762 - protein, 74 aa, Neisseria
NCCVMKCLGKGILLHNCLGEKEQLNQMCLLVFRRIMNGYLYSQNLANLLQQLKARNDAIMRLMISPIVLGVPTT

SEQ ID NO: 4763 - protein, 34 aa, Neisseria
RNKQLRRKGQIVFSQWLIPRQEKNIQQIQMQLGV

SEQ ID NO: 4764 - protein, 22 aa, Neisseria
PKIHFKIIIIKEKSFSLMIMIS

SEQ ID NO: 4765 - protein, 14 aa, Neisseria
ISAIQLCVTLKMTT

SEQ ID NO: 4766 - protein, 9 aa, Neisseria
KKLARILAK

SEQ ID NO: 4767 - protein, 10 aa, Neisseria
AVDYLKMLVH

SEQ ID NO: 4768 - protein, 16 aa, Neisseria
PNIWLFLVGRYLKISE

SEQ ID NO: 4769 - protein, 24 aa, Neisseria
LKKAQKKSQIYLVAKYLPSPSLVN

SEQ ID NO: 4770 - protein, 6 aa, Neisseria
VQRVMT

SEQ ID NO: 4771 - protein, 12 aa, Neisseria
TSSQAAAQPPTP

SEQ ID NO: 4772 - protein, 44 aa, Neisseria
CSLTPKDKTVTAAISVYSFPKKPLKNPKPVKQATRPSSTSPKPA

SEQ ID NO: 4773 - protein, 49 aa, Neisseria
KKPPPKSASNIPITRAIRASKSFKRQTISGSIRTRIFRPNNRICRLTMN

SEQ ID NO: 4774 - protein, 8 aa, Neisseria
AKNSCKRF

SEQ ID NO: 4775 - protein, 10 aa, Neisseria
PPGRCMTGRH

SEQ ID NO: 4776 - protein, 8 aa, Neisseria
PRRLSLCG

SEQ ID NO: 4777 - protein, 13 aa, Neisseria
GLTRRICAKNGCI

SEQ ID NO: 4778 - protein, 26 aa, Neisseria
MPVLLPPICWRLSASWTTMRISIPTA

SEQ ID NO: 4779 - protein, 29 aa, Neisseria
LYSAAIWQAPCSTNLTRRFAVMPIKKRLS

SEQ ID NO: 4780 - protein, 7 aa, Neisseria
  VARIANT (1)...(7): Xaa = Any Amino Acid
MWLSGFX

SEQ ID NO: 4781 - protein, 327 aa, Neisseria; identical to SEQ ID NO: 3289

SEQ ID NO: 4782 - protein, 397 aa, Neisseria; identical to SEQ ID NO: 3292

SEQ ID NO: 4783 - protein, 15 aa, Neisseria
SDRRRTVFPQQGDAV

SEQ ID NO: 4784 - protein, 68 aa, Neisseria
  VARIANT (1)...(68): Xaa = Any Amino Acid
NAYLHIASDGIATPRTVCRTQPAFASGIGRTQANLRHTAQRRRLICRLKAKMINCRLPFSDGILFSNX

SEQ ID NO: 4785 - protein, 61 aa, Neisseria
MSSPSNTNRQTWSSRLTYILTVAGATVGFGATWRFPYLVGENGGARMCFYSVSRCWLSASR

SEQ ID NO: 4786 - protein, 12 aa, Neisseria
FWWKMSSDGAKA

SEQ ID NO: 4787 - protein, 9 aa, Neisseria
TRWMRSAAR

SEQ ID NO: 4788 - protein, 38 aa, Neisseria
TANPLPKFGNWSAGWAARRVRHHGLLHGTRRLGNQLYR

SEQ ID NO: 4789 - protein, 25 aa, Neisseria
YYWRKFEYFQPRRRCGYKRLLCRTH

SEQ ID NO: 4790 - protein, 34 aa, Neisseria
NSPWEIAFYTLLFVAVNQWILVKGVIGGIEKAAK

SEQ ID NO: 4791 - protein, 215 aa, Neisseria
LMPLLFLFLIAMVVRNVTLPGAMEGVAFYLKPDFSKITAELFVFVLGQVFFALSLGFGVMITLSSYLDKNENLVQTAVITAITNTIIAILAGFMIFPSLFSFGVAPDSGPTLVFQSLPIVFSHMWAGSVFAVIFFSLLLIAALTTSLTIYEVLITTIQEKTKIRRTAAITIVLAAIFIFGNIPSILSYGPWKDVPCSAKIFSMPSTTSAATSCLC

SEQ ID NO: 4792 - protein, 11 aa, Neisseria
PRSVPRCLPVL

SEQ ID NO: 4793 - protein, 23 aa, Neisseria
RTKRRTNCFIKATIRRSIFGLLM

SEQ ID NO: 4794 - protein, 6 aa, Neisseria
NILCRW

SEQ ID NO: 4795 - protein, 8 aa, Neisseria
  VARIANT (1)...(8): Xaa = Any Amino Acid
FSSATCSX

SEQ ID NO: 4796 - protein, 218 aa, Neisseria
MGKANAFTAPITVVNYDEQALNNTEARTLVDAVAKKDASVWQFGGESNTLTGLYFRGYQLDARQFSVNGLTGMYGTQGTTSVQVGSAQLIQGASTAVNGMNPDGAVSGSVNIETKKAADEGNRKIGLARFGNNRAQGTFDLGQRFGENKAFGVRANGKLRHGDTPRHGYSEDNKEFAVNADYRGETLRVAFDSIYAKRKTNGGRARMQDIQNAGGRLS

SEQ ID NO: 4797 - protein, 26 aa, Neisseria
LWADVSKRLNTPIRKNHAERQPELAR

SEQ ID NO: 4798 - protein, 50 aa, Neisseria
RQTEILSINWHRLQPTIPILGRTLPTWMPISKSTAWLCPTPWASWITNTA

SEQ ID NO: 4799 - protein, 27 aa, Neisseria
LWADVSKQSNIPTKNHRAAMPNVSARC

SEQ ID NO: 4800 - protein, 55 aa, Neisseria
WRRGCRNLIWLCTATIWKTWSLPTSKPMIPAKRQWRNRVSAASLKWACVKTGAIS

SEQ ID NO: 4801 - protein, 22 aa, Neisseria
TRSKSNARATGAVIQLPRQQKG

SEQ ID NO: 4802 - protein, 48 aa, Neisseria
PMAIILISPAIRRKAARPATSKVWNAIAVLSSTPTRTCSTILCVRLWV

SEQ ID NO: 4803 - protein, 6 aa, Neisseria
CICNRP

SEQ ID NO: 4804 - protein, 20 aa, Neisseria
KSIQIHAICWLTAYKSPIRA

SEQ ID NO: 4805 - protein, 15 aa, Neisseria
LPKQVWNGIHRLPKA

SEQ ID NO: 4806 - protein, 24 aa, Neisseria
TVMFRISASLTKTRKNNTPSRPIP

SEQ ID NO: 4807 - protein, 12 aa, Neisseria
ARATKPSLAKTL

SEQ ID NO: 4808 - protein, 36 aa, Neisseria
PSAARWKTCSTKTIGRYSAANTTAASPSSVCRALTG

SEQ ID NO: 4809 - protein, 7 aa, Neisseria
  VARIANT (1)...(7): Xaa = Any Amino Acid
RRNWISX

SEQ ID NO: 4810 - protein, 167 aa, Neisseria
MKTDIQTELTQALLPHEKVWANEEKTILAKNILLDLVEKTDPTIIGLLLSNDELKRHFFVEVNGVLVFKLQDFRFFLDKHSVNNSYTKYANRIGLTDSNRFLKDSSDIVLDFPFKDCVLNGGQSTEEGEEIYFKRNNSQPASQPASQPASQPASQPASQPASQPIIH

SEQ ID NO: 4811 - protein, 10 aa, Neisseria
INPKKTRNLF

SEQ ID NO: 4812 - protein, 5 aa, Neisseria
SNPCF

SEQ ID NO: 4813 - protein, 38 aa, Neisseria
RKSILKILSLYRRRQTSRWRNQTTFRRHTRRKSHYQRQ

SEQ ID NO: 4814 - protein, 11 aa, Neisseria
SDCPAFACQAV

SEQ ID NO: 4815 - protein, 8 aa, Neisseria
RQSEADLY

SEQ ID NO: 4816 - protein, 5 aa, Neisseria
IQRQI

SEQ ID NO: 4817 - protein, 29 aa, Neisseria
SFHLADFYEKPSRNRQRAAYERRFDFCVN

SEQ ID NO: 4818 - protein, 12 aa, Neisseria
RQRTGIFENFNG

SEQ ID NO: 4819 - protein, 4 aa, Neisseria
SFRK

SEQ ID NO: 4820 - protein, 34 aa, Neisseria
KFHLQFYLGKKDRCVRCQTDSDYYRVCLMLLKEL

SEQ ID NO: 4821 - protein, 5 aa, Neisseria
KHVFL

SEQ ID NO: 4822 - protein, 7 aa, Neisseria
YREIQIK

SEQ ID NO: 4823 - protein, 12 aa, Neisseria
TGKRQILYRQFR

SEQ ID NO: 4824 - protein, 5 aa, Neisseria
RGIAV

SEQ ID NO: 4825 - protein, 20 aa, Neisseria
QFEFCNPMSRWHFYVSEWQD

SEQ ID NO: 4826 - protein, 7 aa, Neisseria
WLDMEME

SEQ ID NO: 4827 - protein, 10 aa, Neisseria
LGNNKRFFGV

SEQ ID NO: 4828 - protein, 4 aa, Neisseria
KIKV

SEQ ID NO: 4829 - protein, 8 aa, Neisseria
KIWMECML

SEQ ID NO: 4830 - protein, 5 aa, Neisseria
KLYVG

SEQ ID NO: 4831 - protein, 11 aa, Neisseria
RKQADRTFCSL

SEQ ID NO: 4832 - protein, 13 aa, Neisseria
ELNTGYLKYTCDR

SEQ ID NO: 4833 - protein, 15 aa, Neisseria
IEKTVRQQSFYYSKT

SEQ ID NO: 4834 - protein, 23 aa, Neisseria
ELIAVSYSNCHIRIRHRLRLPSW

SEQ ID NO: 4835 - protein, 17 aa, Neisseria
WHNRRRCPQNEPPIYRY

SEQ ID NO: 4836 - protein, 5 aa, Neisseria
TNGLY

SEQ ID NO: 4837 - protein, 4 aa, Neisseria
NACC

SEQ ID NO: 4838 - protein, 6 aa, Neisseria
TLEKSD

SEQ ID NO: 4839 - protein, 26 aa, Neisseria
WRARRYFQSRELARWWRVCLCRTCPI

SEQ ID NO: 4840 - protein, 20 aa, Neisseria
RNRKTTNFGLRRFRRHQNAV

SEQ ID NO: 4841 - protein, 15 aa, Neisseria
RFMRTLFLEIQRQRK

SEQ ID NO: 4842 - protein, 6 aa, Neisseria
SNHSRA

SEQ ID NO: 4843 - protein, 14 aa, Neisseria
ISIFAIRRTKTNGA

SEQ ID NO: 4844 - protein, 15 aa, Neisseria
NVGFKSNVCFIIRNG

SEQ ID NO: 4845 - protein, 9 aa, Neisseria
RTICRLPER

SEQ ID NO: 4846 - protein, 22 aa, Neisseria
  VARIANT (1)...(22): Xaa = Any Amino Acid
SLKPCILSISKKSSGEKRWRIX

SEQ ID NO: 4847 - protein, 697 aa, Neisseria
MANNKTLFEVIENERKAVKKYKPELLEMPEFTSKNLKYDFFEWQKSALENFLIFDRTSKLDDFPDLKNKPTHLLFNMATGAGKTMMMAALILYYFEKGYRHFLFFVNQNNIVDKTENNFTDPTHAKFLFTEKILQGDTVIPIRKVETFSPHSDGIEIKFTSIQKLYNDIRTRRENQTTLADLHKLNLVMLGDEAHHLNAQTKGKKQGELDLEKEMNDRTSNAEIERKGWEHMVLELLLNKNGNHSQNVLLEFTATLPENADVQQKYADKIITKFGLKEFLQKGYTKEINLVSSTLGKKERVLHALLFAWYRHRIALKYGIANFKPVMLFRSKTIDESKADYLAFLNWAENVQAVDFSFLTTFSTSLNDSDSDNANEQGKTRTEQALKFMQEKGVEFAHLADWVKQNYQKHNVIITNSETNKTKTEKTDSETEKLLNNLEAADNPIRAIFTVDRLTEGWDVLNLFDIVRLYEGQNGGGSNKKSGKTAAATVSEKQLIGRGVRYFPFAFEGKQPNKRKFDNDMQHELRILEELFYYTHDEQSRYITELKNELRKDGYLPEKDDDKVLATFKLKSEFADNQDFRELLIWANKKIPNPNARANNADSLKANPQTLPFQVHGNQLLQETQFTADENDEIARQIDTQNNFTQIIKMSEMERHIFNKSLHIKGKNGQSLFHFDRLQSKLNIYNRNELQNNLLKD

SEQ ID NO: 4848 - protein, 227 aa, Neisseria
QIEFLGLGQDKQISPDDKLAGCLKILEMVEKHLNESDMPFIGTKEFTPKKLWEIFGTPKQKWVKKDDIKTAIATQNDWYVMDNFAGTSLEEALIQFISEHLGDLKSKYDVHLIRNEEVFKLNNFSDGEGFMPDFILLLKNKQKSSSNGVDDFLHYQIFIEPKGEHLVENDSWKDAFLKAITAEYGTDKILQKDTPHYRLIGLPFFTDNQENEQFTKSFPLGAASLEK

SEQ ID NO: 4849 - protein, 21 aa, Neisseria
MRKSRLSRYKQINSLNCLSQV

SEQ ID NO: 4850 - protein, 7 aa, Neisseria
LQERQQS

SEQ ID NO: 4851 - protein, 31 aa, Neisseria
ALIKVPQPIIFIVYDYLFIKTVRIWKCLMAK

SEQ ID NO: 4852 - protein, 42 aa, Neisseria
KQMKVILLNDKTISMELRTFGTGQNVIYASLTAFPKRILSCI

SEQ ID NO: 4853 - protein, 11 aa, Neisseria
RGTNGVLTTVR

SEQ ID NO: 4854 - protein, 6 aa, Neisseria
KFKFPF

SEQ ID NO: 4855 - protein, 6 aa, Neisseria
  VARIANT (1)...(6): Xaa = Any Amino Acid
NRVYPX

SEQ ID NO: 4856 - protein, 73 aa, Neisseria
MTSANFNINGFGDVKLTPYSPLLGYKAWDSFIGSIQSLSDLIYNVDNNRNKMEITVNNAIQAADSFLSSNWKR

SEQ ID NO: 4857 - protein, 7 aa, Neisseria
QNNKITK

SEQ ID NO: 4858 - protein, 29 aa, Neisseria
QILLLYLHPSITFFKFKKCISRYTRNRKI

SEQ ID NO: 4859 - protein, 6 aa, Neisseria
YSTSNW

SEQ ID NO: 4860 - protein, 6 aa, Neisseria
YIHCCW

SEQ ID NO: 4861 - protein, 20 aa, Neisseria
WITIYKTTNRGDGSKQILTN

SEQ ID NO: 4862 - protein, 6 aa, Neisseria
IKNWFK

SEQ ID NO: 4863 - protein, 10 aa, Neisseria
NAKILYCFTA

SEQ ID NO: 4864 - protein, 113 aa, Neisseria
IELNKDYGNERLGESIMNIDDFTPSKIANFFADPDTYSNVLEEVSRFIYSLVPDDANPWKGGEDYIGRGISEWGELLEKWYKQDFLPYLEKNGTNFRNLKIGCLNSLNGQESG

SEQ ID NO: 4865 - protein, 15 aa, Neisseria
LSNVQANITFTIPSP

SEQ ID NO: 4866 - protein, 6 aa, Neisseria
IWTATV

SEQ ID NO: 4867 - protein, 37 aa, Neisseria
KPLPPKAFQAAYLITPTTASAPPRAGLLHMTVFLCAN

SEQ ID NO: 4868 - protein, 27 aa, Neisseria
  VARIANT (1)...(27): Xaa = Any Amino Acid
TVTGALLARQIPYSNLCIHGLIINQDX

SEQ ID NO: 4869 - protein, 160 aa, Neisseria
MRKSRLSQYKQNKLIELFVTGVTARTAAELVGVNKNTAAYYFHRLRLLIYQNSPHLEMFDGEVEADESYFGGQRKGKRGRGAAGKVAVFGLLKRNGKVYTVTVPNTQTATLFPIIREQVKPDSIIYTDCYRSYDVLDVREFSHFSFAETSFSYQSQHTFC

SEQ ID NO: 4870 - protein, 5 aa, Neisseria
TTKPY

SEQ ID NO: 4871 - protein, 13 aa, Neisseria
ELLEPGKTSFTQV

SEQ ID NO: 4872 - protein, 7 aa, Neisseria
RHSQSAF

SEQ ID NO: 4873 - protein, 4 aa, Neisseria
  VARIANT (1)...(4): Xaa = Any Amino Acid
AVFX

SEQ ID NO: 4874 - protein, 187 aa, Neisseria; identical to SEQ ID NO: 3939

SEQ ID NO: 4875 - protein, 841 aa, Neisseria
PTASFKHTGELTADHRGSRRAVLDVSGSLNKANTLRGRLVGAEEYKKSFKDRVWGRKHMVYGIAEADAGDSSVLTLGGMYQKSREVPDFSGIILPCENQKTAPFSSTPACNRPLQLPRNTYLGEDWSRLSADKYNLFSGFKHVFDNGWQLNAEVSYTKNESDAKVGQFFLKNEYAAGLSGEDAVGFLTEKNEVIPFEPKDKALEKLKAYRDETAKEYRERKDDFVKNRFDNTAFEQYRSRRAAERKAGFDKCMSDPFALDFICQGSWGDPGVDADKAEFVDKALAKEGIFNNAAQRFPNSLYDSSFNRKATANRRYSYMPLRHTKDDRQWGIKLDLTGTYGLFGREHDFFVGYAYGDEKIRSEYLEIYERRYRVRPNTGATHGVYAGSCQEEPDGDLSSPLVRGHKEPDWQAYDEKGNRTVYAEECRNAKKIKTEPKLDAEGKQVYYYDEYSGSRTPVYVDVYELDEKGNKIQETNPDGTPAFTGFSGTVPVWKTVKVADDHVPALYNYAKYLNTNKTHSLTASTRFNVTGRLHLLGGLHYTRYETSQTKDMPVRYGQPASDFQTASSIRADQDHYTAKMQGHKLTPYAGITYDLTPQQSIYGSYTKIFKQQDNVDVSAKTVLPPLVGTNYEVGWKGAFLQGRLNASFALFYLEQKNRTVVDFGYVPGAGGKQGSFQTVAKPIGKVVSRGAEFELSGELNEDWKVFAGYTYNKSRYKNAAEVNAERLAKNSSADPYNFSNFTPVHIFRFGTSFHIPNTGLTVGGGVSAQSGTSSLYNIRQGGYGLIDGFVRYELGKHAKLSLIGTNLNGRTYFENNYNRTRGANNFYGEPRTVSMKLDWQF

SEQ ID NO: 4876 - protein, 66 aa, Neisseria
LQNGIMRKACRNRPLTEAQTKRNRYLSKTRYSGLNLNQDKATKPQTVQIVRNRFTWCFSTLENRSL

SEQ ID NO: 4877 - protein, 11 aa, Neisseria
AKARQRRTGFC

SEQ ID NO: 4878 - protein, 14 aa, Neisseria
STICGRTELRYAAP

SEQ ID NO: 4879 - protein, 12 aa, Neisseria
IPLRPGSLFRTD

SEQ ID NO: 4880 - protein, 29 aa, Neisseria
  VARIANT (1)...(29): Xaa = Any Amino Acid
SECAKPSEGDVFEPFESRQQAKCARCRLX

SEQ ID NO: 4881 - protein, 50 aa, Neisseria
MNPAPKKPSLLFSSLLFSSLLFSSLLFSSLPQRRRQVKTAAAARIMCRRI

SEQ ID NO: 4882 - protein, 22 aa, Neisseria
LMPPNALPTIIRKQPVQTTQAQ

SEQ ID NO: 4883 - protein, 26 aa, Neisseria
AIISETSVRIPSTPGCRSATISAAGG

SEQ ID NO: 4884 - protein, 16 aa, Neisseria
RQIMPVTENGTTINIP

SEQ ID NO: 4885 - protein, 16 aa, Neisseria
TQKSCKKTIAVASGKN

SEQ ID NO: 4886 - protein, 52 aa, Neisseria
RRKIRKTVHSTPLLLSAYPPFTISNSTINSINSNPISVRASPTDTLNIRFIR

SEQ ID NO: 4887 - protein, 39 aa, Neisseria
EKKPRLLSVHQRKALQCQAKSYKVRPTNLPITKATVSAA

SEQ ID NO: 4888 - protein, 15 aa, Neisseria
VLVSSPVSVSTSHPS

SEQ ID NO: 4889 - protein, 31 aa, Neisseria
  VARIANT (1)...(31): Xaa = Any Amino Acid
TPDTVTTTGDAWKTPASKPTKSHWACATTSX

SEQ ID NO: 4890 - protein, 83 aa, Neisseria
MNAAIEHVQAVAFDLDGTLCDSVPDLAAAAEAMLEQLGMKPLPAKVVESYVGDGIGKLVHRVLTNDRDREADSELWEKGFVSI

SEQ ID NO: 4891 - protein, 6 aa, Neisseria
NTTATI

SEQ ID NO: 4892 - protein, 38 aa, Neisseria
ASSPAPIPKPKPGWHCLNLWASRSPSLPTKTKSLPPSF

SEQ ID NO: 4893 - protein, 10 aa, Neisseria
NNWDSPTILA

SEQ ID NO: 4894 - protein, 49 aa, Neisseria
YSAATACPRKNPAPCRCGTPPKFWVSMLQTWLWSATRATTSSPPKPPAA

SEQ ID NO: 4895 - protein, 10 aa, Neisseria
ASALPSVTAI

SEQ ID NO: 4896 - protein, 34 aa, Neisseria
  VARIANT (1)...(34): Xaa = Any Amino Acid
RCSRKTMRPAPTGLSARCPKFTKTCNLRKTKKSX

SEQ ID NO: 4897 - protein, 18 aa, Neisseria
MKLEASKQASRSLKNHLL

SEQ ID NO: 4898 - protein, 31 aa, Neisseria
VYFFLFFIPLRFWLLITFTTKPSSLMMKLPA

SEQ ID NO: 4899 - protein, 17 aa, Neisseria
KNSAIKRVNIGKKKLIL

SEQ ID NO: 4900 - protein, 40 aa, Neisseria
PRIIQKFHPFPHYTLEHTNSKTSITQKRFLFMIKNIPKVT

SEQ ID NO: 4901 - protein, 6 aa, Neisseria
LASPEV

SEQ ID NO: 4902 - protein, 43 aa, Neisseria
GLQKEMGTQKNKYGNILRNVLILTLRYVIIVLAKLKNLDPILL

SEQ ID NO: 4903 - protein, 6 aa, Neisseria
KVIYSP

SEQ ID NO: 4904 - protein, 21 aa, Neisseria
KIVISTAKFYLSGIIQNGLIK

SEQ ID NO: 4905 - protein, 17 aa, Neisseria
FIILKIMFLLQHIYILV

SEQ ID NO: 4906 - protein, 25 aa, Neisseria
IHSTILRLQTTRTLSGKRLVWMNSA

SEQ ID NO: 4907 - protein, 15 aa, Neisseria
KILSGSPVGILMLGN

SEQ ID NO: 4908 - protein, 17 aa, Neisseria
KQRMQTSVLILKVKVYS

SEQ ID NO: 4909 - protein, 23 aa, Neisseria
KKIMLAELVFVLLTILKKRKILH

SEQ ID NO: 4910 - protein, 17 aa, Neisseria
FLRKMLLALPTSSSKIQ

SEQ ID NO: 4911 - protein, 10 aa, Neisseria
KASMGIKLSK

SEQ ID NO: 4912 - protein, 58 aa, Neisseria
MAQQINTHSVFLANTKREFIRFLYNNAQRAFLPKCKNAMIWRFMHNRLKPPIPYSPCV

SEQ ID NO: 4913 - protein, 20 aa, Neisseria
TTKTAIFSTALYHAKACGCV

SEQ ID NO: 4914 - protein, 15 aa, Neisseria
LTDIPTNGCKAKQHL

SEQ ID NO: 4915 - protein, 26 aa, Neisseria
KAIVKVCNSAAKYSHGKTKVINFLLA

SEQ ID NO: 4916 - protein, 23 aa, Neisseria
WADKQNNVALSTTQIQTILQREM

SEQ ID NO: 4917 - protein, 82 aa, Neisseria
KALVQAFTPLGTNFRTNRQVRMRIAGCNINASATVSTLKMVQNVLLQKVLLPQLKQVTMRYWRNTSLKRATAFVFTYNHRHN

SEQ ID NO: 4918 - protein, 4 aa, Neisseria
LIWG

SEQ ID NO: 4919 - protein, 11 aa, Neisseria
TENSAIAKMPT

SEQ ID NO: 4920 - protein, 33 aa, Neisseria
IYLAPANYKLGLAFKLKLNFHSIKISLLNLSPL

SEQ ID NO: 4921 - protein, 18 aa, Neisseria
TRFTTTNLSVWKWTESVE

SEQ ID NO: 4922 - protein, 9 aa, Neisseria
TIRRQLRAN

SEQ ID NO: 4923 - protein, 5 aa, Neisseria
KSNLT

SEQ ID NO: 4924 - protein, 20 aa, Neisseria
PYKPHSTAKQANIIKLNKVR

SEQ ID NO: 4925 - protein, 7 aa, Neisseria
  VARIANT (1)...(7): Xaa = Any Amino Acid
IYSGRFX

SEQ ID NO: 4926 - protein, 503 aa, Neisseria
LSAQGFRRCFKWGTIVPAVFRRSFERKAVRKLPTTVSIRRINVEFSTKTEILQEQQAGAQLFVCTEASQLSNPTVLALLSSLEEGQNFADTKIPTGNGLQAVAVCCLKSTGRAALNKAAAEAAKWAQNQETVNVDVHVFEEAQAAAVAEAFAIAFGNAAYRFDRYKKEAKPAKFETAVFHTAHEAAVKEALRVAEAQVYGQSLCRDLGNAAPNECTPEFLARTAKAEAEKLGAHAKIIEKDYIKENMGSFWSVAKGSAEAPYLVELSYFGAADKEAAPVVLVGKGITFDTGGISLKPGLNMDEMKFDMCGAATVISTFCAAVKLQLPINLIAVVATCENMPSGAANKPGDVVKSMKGLTIEVLNTDAEGRLILCDALTYAEQFKPKAVIDVATLTGACIVALGHDVSGVMGNNQDLIDSLLAASTTWTTKHGNCRSLRPTKTNSNPTLPTFQTSARPARARLPPQHSYPTLPKTIHGHTLTSRVRRGNPVRKKVRPAVPFPCC

SEQ ID NO: 4927 - protein, 7 aa, Neisseria
  VARIANT (1)...(7): Xaa = Any Amino Acid
TICGIFX

SEQ ID NO: 4928 - protein, 33 aa, Neisseria
MNPAPKKPSLLFSSLLFSSLLFSSLLFRSAGGK

SEQ ID NO: 4929 - protein, 78 aa, Neisseria
RRQPQPVLCAGGFSLCRRTYYPRLSESNRYRQRQNKHSKRLFQKHPCAFHPPPSVSRLRFRRLEDSGRLCQLQKMEQQ

SEQ ID NO: 4930 - protein, 46 aa, Neisseria
IFRQHKSVERKPGQQDKTEDGKSGKRYVPRLFFSRLIRHLRFQTQR

SEQ ID NO: 4931 - protein, 14 aa, Neisseria
IQTLYRCARRLRTR

SEQ ID NO: 4932 - protein, 32 aa, Neisseria
TSGSFGGNQNHDLYHCTNGRRYSGRHYPRETE

SEQ ID NO: 4933 - protein, 63 aa, Neisseria
  VARIANT (1)...(63): Xaa = Any Amino Acid
QTCLSRKQQHQQLGAWCHRWCRFRHHAQADLGHRIPLPQLGTLGKHPLQNPRSLIGHALPLLX

SEQ ID NO: 4934 - protein, 123 aa, Neisseria
MKLSELFNPDEFAARHLSFGDEAALLAAVGEKSMDDFVGNTVPQSIRMPSELDLPDALTEADALAKLKGIASKNMINKSYIGLGYYPTRVPNVILRNVLENPGWYTAYTPYQAEIAQVVWKLC

SEQ ID NO: 4935 - protein, 8 aa, Neisseria
TSNKCVSI

SEQ ID NO: 4936 - protein, 29 aa, Neisseria
PVSLWRARLCWTKRPPPPKRWRWRTAWAR

SEQ ID NO: 4937 - protein, 17 aa, Neisseria
NPSVSLWTSACIRKLWT

SEQ ID NO: 4938 - protein, 47 aa, Neisseria
KPVPSISASSWWSAILPKPTKANTSARCSNTSAKTATCKTCRTLSAV

SEQ ID NO: 4939 - protein, 13 aa, Neisseria
KPKARLSPFPPTS

SEQ ID NO: 4940 - protein, 4 aa, Neisseria
AWFC

SEQ ID NO: 4941 - protein, 101 aa, Neisseria
NRLPNWVRILRWATHNASACRWASAGRTPLISRLKTSSNVPPRAASSAYPKTHRANLPCAWLCPPVSNTSAAKKLHPIFVPRRHCWRIWRVCMPFTTALKA

SEQ ID NO: 4942 - protein, 22 aa, Neisseria
NALPTAFTRWLLPLPMRWFQTA

SEQ ID NO: 4943 - protein, 78 aa, Neisseria
MWFTKSFSILLPSILAVKRKQTKCLPLLWRRVTTCAASTILKLRLHSMKHRHTKIWSICTARLPARIRLHLPMMSKAV

SEQ ID NO: 4944 - protein, 28 aa, Neisseria
TPNCCVRTTFCNILCSTVTTPNTKCCVI

SEQ ID NO: 4945 - protein, 9 aa, Neisseria
KNSKTATWR

SEQ ID NO: 4946 - protein, 7 aa, Neisseria
FHWAAVL

SEQ ID NO: 4947 - protein, 41 aa, Neisseria
NSTRLRKCCRLLGPSSPTSILTLPKRKPPATANCSPIWKTA

SEQ ID NO: 4948 - protein, 42 aa, Neisseria
KPSPALTRFPCNQIPAHKANTPVCSPSAAIRNPKAKRTATSV

SEQ ID NO: 4949 - protein, 17 aa, Neisseria
FQNQPTVPTPPPPPCSV

SEQ ID NO: 4950 - protein, 17 aa, Neisseria
KSSSSTPTNTATSTLTI

SEQ ID NO: 4951 - protein, 14 aa, Neisseria
KPKPSNTATLCLPS

SEQ ID NO: 4952 - protein, 53 aa, Neisseria
LPIRPPTACTKKASATSAALFTKTADRFTWTVRTSTPKSASCSLPKSVRMCCT

SEQ ID NO: 4953 - protein, 21 aa, Neisseria
TCTKPSVSLTAAAARAWVRLA

SEQ ID NO: 4954 - protein, 12 aa, Neisseria
KPIWLRLPRAIP

SEQ ID NO: 4955 - protein, 30 aa, Neisseria
PTPTTRLPIKPPWLPQHMVLHPSCRLLGCT

SEQ ID NO: 4956 - protein, 64 aa, Neisseria
WANKAWNRQRAGHCSTPTTSPKPWARIIRFSTPAKTAASRTNVSSTCVRSKPKAALPKPTSPNA

SEQ ID NO: 4957 - protein, 17 aa, Neisseria
WTTASTPRPSPSPLPAR

SEQ ID NO: 4958 - protein, 18 aa, Neisseria
SNRPKARAKPNSTASSPP

SEQ ID NO: 4959 - protein, 7 aa, Neisseria
NKSNRKC

SEQ ID NO: 4960 - protein, 23 aa, Neisseria
KSGAANGRKTTTHWSTRRTPPQI

SEQ ID NO: 4961 - protein, 54 aa, Neisseria
  VARIANT (1)...(54): Xaa = Any Amino Acid
PATGRIRIPAKKPSSRCRSSANTSFGPSSTAWTTCTATAISCAAAHRWKIMKTX

SEQ ID NO: 4962 - protein, 41 aa, Neisseria
LHKHAIEGFNTMPAKGGRGDLSDDEVKAAVDYMVNQSGGKF

SEQ ID NO: 4963 - protein, 104 aa, Neisseria
LYYEQCKNISQTAATFNLSRNTLYLWIRLKKQTGSLKHQVTGLNAVKSDRQKPAQYVGQHQDAYLHEIAKHFDCTAATVCYALKQMGITRKKRPPLTKNKTRPK

SEQ ID NO: 4964 - protein, 30 aa, Neisseria
HSRPNFLTTNAFIWMKQDLTATCSVPMPAA

SEQ ID NO: 4965 - protein, 18 aa, Neisseria
VEKDTDAYLWCPHKSATG

SEQ ID NO: 4966 - protein, 9 aa, Neisseria
LLRWFIKIR

SEQ ID NO: 4967 - protein, 16 aa, Neisseria
PESFLKRGFSNAYCPH

SEQ ID NO: 4968 - protein, 4 aa, Neisseria
LKNR

SEQ ID NO: 4969 - protein, 68 aa, Neisseria
  VARIANT (1)...(68): Xaa = Any Amino Acid
IMHDFTVWVSYGKWRKNWDIRYCLLHLIHLSSTRLRRFGRILSGICEPYCLITPDLTMHYCPILILIX

SEQ ID NO: 4970 - protein, 58 aa, Neisseria; identical to SEQ ID NO: 4560

SEQ ID NO: 4971 - protein, 7 aa, Neisseria
RTVKETC

SEQ ID NO: 4972 - protein, 33 aa, Neisseria; identical to SEQ ID NO: 4562

SEQ ID NO: 4973 - protein, 40 aa, Neisseria; identical to SEQ ID NO: 4563

SEQ ID NO: 4974 - protein, 23 aa, Neisseria
WVRKTPYTVASILAANKIPFFSN

SEQ ID NO: 4975 - protein, 19 aa, Neisseria
PAPVAASQKKAGNHDFSHS

SEQ ID NO: 4976 - protein, 59 aa, Neisseria; identical to SEQ ID NO: 4566

SEQ ID NO: 4977 - protein, 93 aa, Neisseria; identical to SEQ ID NO: 4567

SEQ ID NO: 4978 - protein, 10 aa, Neisseria
KNSSDVRQTV

SEQ ID NO: 4979 - protein, 14 aa, Neisseria
NSFFPNWTKPNCLN

SEQ ID NO: 4980 - protein, 21 aa, Neisseria
LSRVITSCPSLWLPKPTTAPF

SEQ ID NO: 4981 - protein, 60 aa, Neisseria; identical to SEQ ID NO: 4571
  VARIANT (1)...(60): Xaa = Any Amino Acid

SEQ ID NO: 4982 - protein, 64 aa, Neisseria
MNSDLPSFNTIWQGTADHLSISDSLVRRWVTKYRLHGESGIKRRKHTTKYSVEYKLEAIRLVAG

SEQ ID NO: 4983 - protein, 38 aa, Neisseria
GMSQKAAADQLNLPDCSILLQWLRLYHLNGINGLKPKP

SEQ ID NO: 4984 - protein, 54 aa, Neisseria
TQRKKAREKTASAGNEKADYLKTKEELLAELACLKAEMAALKKLDALIYGKEVR

SEQ ID NO: 4985 - protein, 238 aa, Neisseria
MNRPKQPFFRPEVAVARQTSLTGKVILTRPLSFSLWTTFASISALLIILFLIFGNYTRKTTVEGQILPASGVIRVYAPDTGTITAKFVEDGEKVKAGDKLFALSTSRFGAGGSVQQQLKTEAVLKKTLAEQELGRLKLIHGNETRSLKATVERLENQELHISQQIDGQKRRIRLAEEMLQKYRFLSANDAVPKQEMMNVKAELLEQKAKLDAYRREEVGLLQEIRTQNLTLASLPQAA

SEQ ID NO: 4986 - protein, 6 aa, Neisseria
DRTKLA

SEQ ID NO: 4987 - protein, 13 aa, Neisseria
THHCRYFSRSFGF

SEQ ID NO: 4988 - protein, 22 aa, Neisseria
TNHPCRTVGLYSNTERRSRTAG

SEQ ID NO: 4989 - protein, 100 aa, Neisseria
SFQTALEHCSRTYRAICPSIYPQQCSRLYQAERQGCPTLSGISLSKIRACFRQCRISSKNGTGQTGIVGIGHGILRFGEEQRTCLSCENKTRQINHHCIR

SEQ ID NO: 4990 - protein, 21 aa, Neisseria
  VARIANT (1)...(21): Xaa = Any Amino Acid
GKTAANRHDVGSRHPTRETVX

SEQ ID NO: 4991 - protein, 43 aa, Neisseria
MRVLLVEDDAMIAEAVSASLKDGGYAVDWVKNGARLPLPSLMT

SEQ ID NO: 4992 - protein, 97 aa, Neisseria
  VARIANT (1)...(97): Xaa = Any Amino Acid
CCWIWVCRGGTVWMFVPLAMLAGMFSYYETFHETEALQDDLLRQAALYVAPDSKPETLPEGDGDTRILVQMPQQEDPVVSLPAHLADGLHTLQADDX

SEQ ID NO: 4993 - protein, 166 aa, Neisseria
MRKSRLSRYKQNKLIELFVAGVTARTAAELVGVNKNTAAYYFHRLRLLIYQNSPHLEMFDGEVEADESYFGGQRKGKRGRGAAGKVAVFGLLKRNGKVYTVTVPNTQTATLFPIIREQVKPDSIVYTDCYRSYDVLDVREFSHFSFAETSFSYQSQHTFCRTTKPY

SEQ ID NO: 4994 - protein, 13 aa, Neisseria
ELLESGKTSFTQV

SEQ ID NO: 4995 - protein, 7 aa, Neisseria
RHSQSAF

SEQ ID NO: 4996 - protein, 10 aa, Neisseria
AVFKGVRMAF

SEQ ID NO: 4997 - protein, 9 aa, Neisseria
  VARIANT (1)...(9): Xaa = Any Amino Acid
DKSSCSILX

SEQ ID NO: 4998 - protein, 7 aa, Neisseria
FVLYSND

SEQ ID NO: 4999 - protein, 76 aa, Neisseria
IKVTAKKNVFFGYFASLNRATGTIDIRVHDTDSTKGKNGIFQSIGIKTALSLQKYQIDKPGKEIRPCRLKKRPPVR

SEQ ID NO: 5000 - protein, 36 aa, Neisseria
MNKTLKRRVFRHTALYAAILMFSHTGGGGGGDGANP

SEQ ID NO: 5001 - protein, 33 aa, Neisseria
IRYYHERAKPAQGKGEWAIFNNKGQRQGTQIYL

SEQ ID NO: 5002 - protein, 41 aa, Neisseria
KRPGWRLCLFRQYRYPCFPTKRYCRFWHSHLPAALRQGFRF

SEQ ID NO: 5003 - protein, 11 aa, Neisseria
CRRAERARQCR

SEQ ID NO: 5004 - protein, 30 aa, Neisseria
LDSYDPPRVDRLQLHQCRMQRQHRLSQTCL

SEQ ID NO: 5005 - protein, 18 aa, Neisseria
NPIFLRQHRFGKKCGQPG

SEQ ID NO: 5006 - protein, 45 aa, Neisseria
APGPKPRKFAHLQIEGSSMVGRVFQFGQREYRQKWQLIQQIDIFF

SEQ ID NO: 5007 - protein, 40 aa, Neisseria
SNHRLYDRRLPYFPWRPAARTYRRGLLSERQTAPAGQKRD

SEQ ID NO: 5008 - protein, 33 aa, Neisseria
RYHRQNSAVGCLEAEHRCEDTKYGAWRHSSLLG

SEQ ID NO: 5009 - protein, 21 aa, Neisseria
RYRADSSQARPAASQSRPLHQ

SEQ ID NO: 5010 - protein, 27 aa, Neisseria
TEPQSQQKRPFAGPDCPRAVVRTCERW

SEQ ID NO: 5011 - protein, 28 aa, Neisseria
GGDVFRFGFYLPRQFEQPNFPAKPFPQG

SEQ ID NO: 5012 - protein, 17 aa, Neisseria
HKQTGPLFPQTLEYVGD

SEQ ID NO: 5013 - protein, 23 aa, Neisseria
RAEFHGAANRHPIGWRRTAYPTG

SEQ ID NO: 5014 - protein, 7 aa, Neisseria
GHRFKWK

SEQ ID NO: 5015 - protein, 9 aa, Neisseria
RQKRHFRHY

SEQ ID NO: 5016 - protein, 6 aa, Neisseria
RRELHA

SEQ ID NO: 5017 - protein, 17 aa, Neisseria
CQRVEKSIAALDGSGFC

SEQ ID NO: 5018 - protein, 65 aa, Neisseria
SIQQRRKQRQQAKIQPKIPHPRKRQARFGRHRQQPDCRGRRVFGYFRQRRDGAYLQKRQRGRARL

SEQ ID NO: 5019 - protein, 52 aa, Neisseria
SEAQLYPGHDAAQGYSKHRIHPCQRAAHLCRKRLCGRPLWRGRRLCLAPHYR

SEQ ID NO: 5020 - protein, 39 aa, Neisseria
PRQAKTLLYVRRNGLWRQRRIRLGFKQNRQQQPGRRFHV

SEQ ID NO: 5021 - protein, 36 aa, Neisseria
CQKRQWREIRLHRRYAANRQNPQRQIRRLPRLRLCD

SEQ ID NO: 5022 - protein, 4 aa, Neisseria
QRRE

SEQ ID NO: 5023 - protein, 6 aa, Neisseria
NRAVCV

SEQ ID NO: 5024 - protein, 28 aa, Neisseria
FGKQQRYADCNNQRTRRQGRAFVPHVGG

SEQ ID NO: 5025 - protein, 21 aa, Neisseria
RFGRHGRYRLCRRPRREYVPL

SEQ ID NO: 5026 - protein, 15 aa, Neisseria
FEQQRSDQMVCTYYF

SEQ ID NO: 5027 - protein, 4 aa, Neisseria
RHAG

SEQ ID NO: 5028 - protein, 23 aa, Neisseria
ADYLRARRFQTERQTRGYLRYGQ

SEQ ID NO: 5029 - protein, 10 aa, Neisseria
KGYTIYLRYF

SEQ ID NO: 5030 - protein, 23 aa, Neisseria
HRHGCGRRRTGQRVARATPYSGR

SEQ ID NO: 5031 - protein, 46 aa, Neisseria
NLIPDRLQAIRRLGRQGLGSEIGSRTARYRQTDRGIAYRLCNHPQI

SEQ ID NO: 5032 - protein, 43 aa, Neisseria
RRRLRRGNRHFGHQYCRRRQADQEKRAPDCAGSQYGCRAIFRS

SEQ ID NO: 5033 - protein, 17 aa, Neisseria
ANRQRQIHPYRLYVEKQ

SEQ ID NO: 5034 - protein, 13 aa, Neisseria
NRLPERICLRQTG

SEQ ID NO: 5035 - protein, 5 aa, Neisseria
CALSG

SEQ ID NO: 5036 - protein, 23 aa, Neisseria
KENRRIFNNGRRRCGRQRNIQRG

SEQ ID NO: 5037 - protein, 5 aa, Neisseria
KTRPQ

SEQ ID NO: 5038 - protein, 34 aa, Neisseria
PVLLRKRCAHPADERFGQLGYYRPDVRYETNQLA

SEQ ID NO: 5039 - protein, 5 aa, Neisseria
  VARIANT (1)...(5): Xaa = Any Amino Acid
SLLLX

SEQ ID NO: 5040 - protein, 17 aa, Neisseria
MKFPSFLPLNGYSACRQ

SEQ ID NO: 5041 - protein, 20 aa, Neisseria
SRYWGLVRSLLMFTVMIPPQ

SEQ ID NO: 5042 - protein, 8 aa, Neisseria
TLRLPKII

SEQ ID NO: 5043 - protein, 4 aa, Neisseria
KRLS

SEQ ID NO: 5044 - protein, 41 aa, Neisseria
TSLPAMSIPHPEQPAGCRQYFDVCCLMPMRQIIPAISLTGK

SEQ ID NO: 5045 - protein, 7 aa, Neisseria
RFSKTMS

SEQ ID NO: 5046 - protein, 15 aa, Neisseria
TRGQCPVEKWRFIRG

SEQ ID NO: 5047 - protein, 5 aa, Neisseria
STNSS

SEQ ID NO: 5048 - protein, 12 aa, Neisseria
PMTKLPPLWGMK

SEQ ID NO: 5049 - protein, 16 aa, Neisseria
RTPCMNTVKIRSGSKS

SEQ ID NO: 5050 - protein, 6 aa, Neisseria
PIRRRR

SEQ ID NO: 5051 - protein, 5 aa, Neisseria
ARRLY

SEQ ID NO: 5052 - protein, 39 aa, Neisseria
TKNRILIRNWSDWVWIFWGRTVLPCLIAAAWKKKPMRGE

SEQ ID NO: 5053 - protein, 17 aa, Neisseria
WRRQAIIRRPLSGFGKK

SEQ ID NO: 5054 - protein, 23 aa, Neisseria
IRKTTKTALFMLLPLLIRQTMPV

SEQ ID NO: 5055 - protein, 28 aa, Neisseria
  VARIANT (1)...(28): Xaa = Any Amino Acid
NGCCRPLCRFMSKVSEIRGALIKNVGVX

SEQ ID NO: 5056 - protein, 54 aa, Neisseria
MKITHCKLKKKVQKELLRFLCWKLPPVLPPIFWVSIPIRQHCSTVKSARLSTII

SEQ ID NO: 5057 - protein, 40 aa, Neisseria
PWLPMRFLRALSSRTKAISADGVKADVVAVRQEKWLSSAF

SEQ ID NO: 5058 - protein, 10 aa, Neisseria
NATDGAIPLS

SEQ ID NO: 5059 - protein, 26 aa, Neisseria
IMPSLKRYSLSSRRKSCRTALFIPIV

SEQ ID NO: 5060 - protein, 7 aa, Neisseria
AAATSWT

SEQ ID NO: 5061 - protein, 39 aa, Neisseria
  VARIANT (1)...(39): Xaa = Any Amino Acid
AVLSITASTIPRSLQTVRTTLTALRIFGIRQNASCENYX

SEQ ID NO: 5062 - protein, 54 aa, Neisseria
MKITHCKLKKKVQKELLRFLYWKLPPVLPPIFWVSIPIRQHCSTVKSARLSTII

SEQ ID NO: 5063 - protein, 40 aa, Neisseria
PWLPMRFLRALSSRTKAISADGVKVDVVAVQQEKWLSSAF

SEQ ID NO: 5064 - protein, 37 aa, Neisseria
NATDGSIPLWWIMPSLKRYSLSSRRKSCRTVLFIPIV

SEQ ID NO: 5065 - protein, 7 aa, Neisseria
AAATSWT

SEQ ID NO: 5066 - protein, 49 aa, Neisseria
AVSFITASTIPRNLQTVRTTLTALRIFGIRQNVSCENTMESIVNLSRCS

SEQ ID NO: 5067 - protein, 26 aa, Neisseria
  VARIANT (1)...(26): Xaa = Any Amino Acid
KNANFDLTSAHRLNSLKSCGIGVGFX

SEQ ID NO: 5068 - protein, 266 aa, Neisseria
MSTFFQQTAQAMIARHIDRFPLLKLDQVIDWQPIEQYLNRQKTRYLRDHRGRPAYPLLSMFKAVLLGQWHSLSDPELEHSLITRIDFNLFCRFDELSIPDYSTLCRYRNRLAQDDTLSELLELINRQLTEKGLKVEKASAAVVDATIIQTVGSKQRQAIEVDEEGQINGQTTPSKDSDARWIKKNGLYKLGYKQHTRTDAEGYIEKLHITPANAHECKHLPPLLEGLPKGRPSMPTKATTVRKTGNIWKNISCRTALCAKPAATVR

SEQ ID NO: 5069 - protein, 18 aa, Neisseria
RKRKPNATGICRRPVIVD

SEQ ID NO: 5070 - protein, 12 aa, Neisseria
IRTRRRSRRQYK

SEQ ID NO: 5071 - protein, 39 aa, Neisseria
YGKARQRRTGLNLIHYMWSNRASVRCTVNSATLGQPISD

SEQ ID NO: 5072 - protein, 5 aa, Neisseria
VRKAI

SEQ ID NO: 5073 - protein, 4 aa, Neisseria
RRCV

SEQ ID NO: 5074 - protein, 5 aa, Neisseria
KRPTG

SEQ ID NO: 5075 - protein, 7 aa, Neisseria
  VARIANT (1)...(7): Xaa = Any Amino Acid
VRPLPPX

SEQ ID NO: 5076 - protein, 190 aa, Neisseria
MKLKIDIATNNFKHGGGTERYTLDLVKGLNRQNITPAVYATKFDHSIPEYALIEPHLVDQHRTLKKLRSFLFSSRLAQTRKNSAAKLIACHHADYADLLICGGTHLGYLHHMAQKPNLLDRLAIRRNRSNYATAKLIMAHSHMMRRELVGLYGVPPERIQVAPPPRRYGTLLSTTRRNCRPARQIRLCRP

SEQ ID NO: 5077 - protein, 125 aa, Neisseria
NRFPVPIDRPHAQRSGTACRLFRTYQPARQARRCRLPASPPYEKRRRTGLLHRYARTLPRRRLYHYGFPVRTLRAGRRRIRPMRHTRRPLRKHGMYRGHERRSRLLFLTPKPGNPGASRCPSRQP

SEQ ID NO: 5078 - protein, 28 aa, Neisseria
KTGRTPPVRPDAGTELQPGFRQTHRADS

SEQ ID NO: 5079 - protein, 6 aa, Neisseria
  VARIANT (1)...(6): Xaa = Any Amino Acid
NACRLX

SEQ ID NO: 5080 - protein, 212 aa, Neisseria
MSTFFQQTAQAMIAKHINRFPLLKLDQVIDWQPIEQYLNRQKTRYLRDHRGRPAYPLLSMFKAVLLGQWHSLSDPELEHSLITRIDFNLFCRFDELSIPDYSTLCRYRNWLAQDDTLSELLKLINRQLTEKGLKVEKASAAVIDATIIQTADGKQRQAIEVDEEGQVSGQTTRSKDSDARWIKKNGLYKLGYKQHTRTDAEGYIEKLHIIVD

SEQ ID NO: 5081 - protein, 12 aa, Neisseria
IRTRRRSRRQYR

SEQ ID NO: 5082 - protein, 95 aa, Neisseria
YGKARQRRTGLNLIHYIMRKACRNRPLTEAQTKRNRYLSKTRYVVEQSFGTLHRKFRYARAAYFGLIKVSAQSHLKAMCLNLLKAANRLSAPAAA

SEQ ID NO: 5083 - protein, 85 aa, Neisseria
MSAQLINGKEVSQKRLQAVAEAVAQRQQNNLHTLAWPWFWSEATLPARFMSATRKLPAKNAASNHCLTSCPNQHRRKNCWHWSTA

SEQ ID NO: 5084 - protein, 50 aa, Neisseria
MPIPKWTVFWFSYRCRSTSTARRFWNVFRRIRTWTASILTMSAGWRSKCR

SEQ ID NO: 5085 - protein, 8 aa, Neisseria
CARVRPRA

SEQ ID NO: 5086 - protein, 38 aa, Neisseria
RFWKLTALIRRGKKRSWSARRISSAARRLWNCCWRAQR

SEQ ID NO: 5087 - protein, 9 aa, Neisseria
RSATAQPKI

SEQ ID NO: 5088 - protein, 13 aa, Neisseria
QTRLPEPIFWWSA

SEQ ID NO: 5089 - protein, 44 aa, Neisseria
AFRTLSKANGSNLARSLLMWASTVWTMAACAATWNLKRQKNGRR

SEQ ID NO: 5090 - protein, 10 aa, Neisseria
LRPFPAAWVR

SEQ ID NO: 5091 - protein, 4 aa, Neisseria
RLPH

SEQ ID NO: 5092 - protein, 14 aa, Neisseria
  VARIANT (1)...(14): Xaa = Any Amino Acid
WKTPCTRLHCTMLX

SEQ ID NO: 5093 - protein, 84 aa, Neisseria
MQARLLIPILFSVFILSACGTLTGIPSHGGGKRFAVEQELVAASARAAVKDMDLQALHGRKVALYIATMGDQGSGSLTGGSLLH

SEQ ID NO: 5094 - protein, 26 aa, Neisseria
CTDSWRIHKQPCRPYRLHLSTLRNHR

SEQ ID NO: 5095 - protein, 16 aa, Neisseria
NNIRRFDRFNHFFIYT

SEQ ID NO: 5096 - protein, 11 aa, Neisseria
CPCTLSHPIRR

SEQ ID NO: 5097 - protein, 15 aa, Neisseria
KQSGLKYWRDGGLSK

SEQ ID NO: 5098 - protein, 4 aa, Neisseria
NLDD

SEQ ID NO: 5099 - protein, 34 aa, Neisseria
PARHCLSFPLGTDRIFPARHRRCFSCQCRYRCVY

SEQ ID NO: 5100 - protein, 36 aa, Neisseria
HRRIRNDTQQNRNAPIQCRNTESPNKTGIFRSRQNQ

SEQ ID NO: 5101 - protein, 11 aa, Neisseria
KIAHQTKNQCV

SEQ ID NO: 5102 - protein, 10 aa, Neisseria
RKLRIVDGAV

SEQ ID NO: 5103 - protein, 5 aa, Neisseria
SKQRN

SEQ ID NO: 5104 - protein, 20 aa, Neisseria
TDGRINGRFLRYPTIRQSYG

SEQ ID NO: 5105 - protein, 7 aa, Neisseria
LRPIRRG

SEQ ID NO: 5106 - protein, 6 aa, Neisseria
GVWIQR

SEQ ID NO: 5107 - protein, 5 aa, Neisseria
SSATT

SEQ ID NO: 5108 - protein, 6 aa, Neisseria
  VARIANT (1)...(6): Xaa = Any Amino Acid
TRTTLX

SEQ ID NO: 5109 - protein, 59 aa, Neisseria
VGFSNPTFSNSGISETIDASNIFVGYKYPTYISAQQTLQGINDLGNLSPKAQLAAASAL

SEQ ID NO: 5110 - protein, 52 aa, Neisseria
DSTFAVKDGINSARQWADAHPNITATAQTALAVAEAAGTVWRGKKVELNPTK

SEQ ID NO: 5111 - protein, 119 aa, Neisseria
DWVKNNGYKTPAARPMQTLDGEMAGGNKPVVKSIRPTTRDELRQALQEQGFRRTGSDAAQYETWKGPDGVKIDIRPNGEVIRTQRVPRTDGVQGKYPQRQDYEGNPLPNNHHHSGYFVK

SEQ ID NO: 5112 - protein, 69 aa, Neisseria
VSRVTIYRALKAVKGRLSPGGFVHPDTDRLLLLKGQKAADKRDYLFVAIDDFYTLPFCRTKPQTVLPSF

SEQ ID NO: 5113 - protein, 10 aa, Neisseria
PNICPTPACT

SEQ ID NO: 5114 - protein, 24 aa, Neisseria
LSTFTLTMIGNIKSRPTCFRCSLL

SEQ ID NO: 5115 - protein, 16 aa, Neisseria
WDWLEACPICLSADQR

SEQ ID NO: 5116 - protein, 13 aa, Neisseria
GGAGYPYLDGDVA

SEQ ID NO: 5117 - protein, 4 aa, Neisseria
GTVV

SEQ ID NO: 5118 - protein, 13 aa, Neisseria
QSGTSAKGVVLLY

SEQ ID NO: 5119 - protein, 14 aa, Neisseria
FRGCPRSLGKFKLS

SEQ ID NO: 5120 - protein, 12 aa, Neisseria
NYPYERKSSKTV

SEQ ID NO: 5121 - protein, 62 aa, Neisseria
THFVIVAMMYWMRANLAISVSITAHILPNDKTILMELRTFGIKQNVIYASLTAFPKRILSCI

SEQ ID NO: 5122 - protein, 11 aa, Neisseria
RSANGVLTTVK

SEQ ID NO: 5123 - protein, 17 aa, Neisseria
  VARIANT (1)...(17): Xaa = Any Amino Acid
KFLFHFKTISKIEFILX

SEQ ID NO: 5124 - protein, 6 aa, Artificial Sequence
  polyglycine sequence
CGGGGS

SEQ ID NO: 5125 - protein, 5 aa, Artificial Sequence
  polyglycine sequence
CGGGS

SEQ ID NO: 5126 - protein, 4 aa, Artificial Sequence
  polyglycine sequence
CGGS

SEQ ID NO: 5127 - protein, 6 aa, Artificial Sequence
  polyglycine sequence
  VARIANT (1)...(6): Xaa = Any Amino Acid
CGXGGS

SEQ ID NO: 5128 - protein, 6 aa, Artificial Sequence
  polyglycine sequence
  VARIANT (1)...(6): Xaa = Any Amino Acid
CGXXGS

SEQ ID NO: 5129 - protein, 6 aa, Artificial Sequence
  polyglycine sequence
  VARIANT (1)...(6): Xaa = Any Amino Acid
CGXGXS

SEQ ID NO: 5130 - protein, 7 aa, Artificial Sequence
  polyglycine sequence
  VARIANT (1)...(7): Xaa = Any Amino Acid
CGGXGGS

SEQ ID NO: 5131 - protein, 7 aa, Artificial Sequence
  polyglycine sequence
  VARIANT (1)...(7): Xaa = Any Amino Acid
CGXGGGS

We claim:

1. A composition comprising a Neisserial antigen and a detoxified ADP-ribosylating toxin, wherein the Neisserial antigen is orf40.

2. The composition of claim 1, wherein the Neisserial antigen is an N. meningitidis antigen.

3. The composition of claim 2, wherein the Neisserial antigen is an N. meningitidis serogroup B protein antigen.

4. The composition of claim 1, wherein the antigen is selected from the group consisting of:
(a) a protein comprising SEQ ID NO: 447, 448, 449, or 4356;
(b) a protein comprising an amino acid sequence having at least 80% sequence identity to SEQ ID NO: 447, 448, 449, or 4356;
(c) a protein comprising a fragment of at least 7 contiguous amino acids of SEQ ID NO: 447, 448, 449, or 4356; or
(d) a protein having formula NH₂-A-[-X-L-]ₙ-B—COOH, wherein X has the amino acid sequence of one of the proteins of (a), (b) or (c), L is an optional linker amino acid sequence, A is an optional N-terminal amino acid sequence, B is an optional C-terminal amino acid sequence, and n is an integer greater than 1.

5. The composition of claim 3, wherein the antigen comprises the amino acid sequence of orf40 (SEQ ID NO:4356).

6. The composition of claim 4, wherein the antigen is a protein having formula NH₂-A-[-X-L-]ₙ-B—COOH, wherein X has the amino acid sequence of one of the proteins of (a), (b) or (c), L is an optional linker amino acid sequence, A is an optional N-terminal amino acid sequence, B is an optional C-terminal amino acid sequence, and n is an integer greater than 1.

7. The composition of claim 6, wherein the value of n is between 2 and 10.

8. The composition of claim 6, wherein -L- has fewer than 20 amino acids.

9. The composition of claim 6, wherein -A- has fewer than 40 amino acids and/or —B— has fewer than 40 amino acids.

10. The composition of claim 4, wherein the ADP-ribosylating toxin is cholera toxin or E. coli heat-labile enterotoxin (LT).

11. The composition of claim 10, wherein the toxin is LT having a mutation at residue Ser-63 or Ala-72.

12. The composition of claim 11, wherein the toxin is LT-K63 or LT-R72.

13. The composition of claim 4, wherein the composition is adapted for mucosal administration.

14. The composition of claim 13, wherein the composition is adapted for intranasal administration.

15. The composition of claim 4, wherein the composition further comprises one or more of the following antigens:
an outer-membrane vesicle (OMV) preparation from N. meningitidis;
a saccharide antigen from N. meningitidis;
a saccharide antigen from Streptococcus pneumoniae;
an antigen from hepatitis A, B or C virus;
an antigen from Bordetella pertussis;
a diphtheria antigen;
a tetanus antigen;
a protein antigen from Helicobacter pylori;
a saccharide antigen from Haemophilus influenzae;
an antigen from N. gonorrhoeae;
an antigen from Chlamydia pneumoniae;
an antigen from Chlamydia trachomatis;
an antigen from Porphyromonas gingivalis;
polio antigen(s);
rabies antigen(s);
measles, mumps and/or rubella antigens;
influenza antigen(s);
an antigen from Moraxella catarrhalis;
an antigen from Streptococcus agalactiae;
an antigen from Streptococcus pyogenes;
and/or an antigen from Staphylococcus aureus.

16. The composition of claim 4, further comprising a buffer.

17. The composition of claim 16, wherein the pH of the composition is between 6 and 8.

18. The composition of claim 17, wherein the composition is sterile and/or pyrogen-free.

19. A method for treating or preventing infection due to Neisseria bacteria comprising administering to a subject the composition of claim 1.

20. A method of raising an immune response in an animal, comprising administering to the animal the composition of claim 1.
